(19) United States
(12) Patent Application Publication
(10) Pub. No.: US 2005/0208496 A1
(43) Pub. Date: Sep. 22, 2005

(54) Methods of testing for bronchial asthma or chronic obstructive pulmonary disease

(75) Inventors: Noriko Ohtani, Gunma (JP); Yuji Sugita, Tsukuba-shi (JP); Mutsuo Yamaya, Sendai-shi (JP); Hiroshi Kubo, Sendai-shi (JP); Hiroichi Nagai, Gifu-shi (JP); Kenji Izuhara, Saga-shi (JP)

Correspondence Address: HAMILTON, BROOK, SMITH & REYNOLDS, P.C., 530 VIRGINIA ROAD, P.O. BOX 9133, CONCORD, MA, 01742-9133, US

(73) Assignee: Genox Research, Inc., Ibaraki (JP)

(21) Appl. No.: 10/631,467

(22) Filed: Jul. 31, 2003

(30) Foreign Application Priority Data
Aug. 6, 2002 (JP) 2002-229312
Mar. 20, 2003 (JP) 2003-077212

(51) Int. Cl. C12Q 1/68

(52) U.S. Cl. 435/6

(57) ABSTRACT

An objective of the present invention is to provide a method of testing for bronchial asthma or chronic obstructive pulmonary disease, a method of screening for candidate compounds for treating bronchial asthma or chronic obstructive pulmonary disease, and a pharmaceutical agent for treating bronchial asthma or chronic obstructive pulmonary disease. The present invention identified genes whose expression levels varied between respiratory epithelial cells that had been stimulated by IL-13 to induce the goblet cell differentiation, and unstimulated respiratory epithelial cells. The respiratory epithelial cells were cultured according to the air interface method. The genes were revealed to be useful as markers for testing for bronchial asthma or chronic obstructive pulmonary disease and screening for therapeutic agents for such diseases. Specifically, the present invention provides methods of testing for bronchial asthma or chronic obstructive pulmonary disease and methods of screening for compounds to treat the diseases based on the comparison of the expression levels of marker genes identified as described above.

### FIELD OF THE INVENTION

[0001] The present invention relates to methods of testing for bronchial asthma or chronic obstructive pulmonary disease (COPD).

### BACKGROUND OF THE INVENTION

[0002] Currently, there are more than one hundred million bronchial asthma patients in the world. The rapid increase in the number of asthma patients is a social problem in Japan as well. In advanced countries, the number has increased by 20-50% in the past decade. Thus, asthma is thought to be one of the diseases that would pose a major health threat in the 21st century.

[0003] Pharmaceuticals used today for treating asthma and candidate pharmaceuticals for that purpose, include: inhaled steroids and oral steroids; agents that suppress the release of inflammatory mediators; anti-allergy agents such as histamine Hl antagonists; β2 agonists that act as bronchodilators; and immunosuppressive agents. According to a report describing clinical cases in New Zealand, the widespread use of inhaled steroids and β2 agonists has decreased the mortality rate of patients by 30% compared to 10 years ago. However, both inhaled steroids and β2 agonists have been reported to have side effects. The side effects of inhaled steroids include oral and esophageal candidiasis, olfactory disorders, adrenal suppression, osteoporosis, cataract, glaucoma, skin thinning, and growth inhibition in children. Side effects of β2 agonists include ischemic diseases, hyperthyroidism, and diabetes mellitus. In addition, regular use of β2 agonists has been known to reduce the efficacy of these drugs.

[0004] Bronchial asthma is characterized by respiratory inflammation and airflow obstruction resulting from various degrees of respiratory stenosis. Representative symptoms include paroxysmal cough and difficulty in breathing. The degree of airflow obstruction in bronchial asthma ranges from relatively mild to life-threatening obstructions. Furthermore, it has been reported that allergic reactions in the mucous membrane of the respiratory tract and bronchial smooth muscles are closely involved in bronchial asthma development.

[0005] Specifically, an atopic disposition accompanied by hyperproduction of IgE antibodies is seen in many bronchial asthma patients. Many causes are thought to lead to bronchial asthma, but there is no doubt that an atopic disposition is one cause of hypersensitivity in many patients. It is predicted that contraction of bronchial smooth muscles, edema of the respiratory tract mucous membrane, or respiratory tract hypersecretion is involved in the mechanism of respiratory obstruction in an asthma attack. Type-I allergic reactions in the respiratory tract due to exposure to pathogenic allergens play an important role in such changes in the respiratory tract.

[0006] In bronchial asthma patients, the activity of Th2 helper T cells is enhanced, and so is the production of Th2 cytokines such as interleukin-3 (hereinafter abbreviated as “IL-3”; similarly, interleukin is abbreviated as “IL”), IL-4, IL-5, IL-13 and granulocyte macrophage colony stimulating factor (GM-CSF), and chemokines such as eotaxin and RANTES. IL-4 and IL-13 have the activity of inducing IgE production, and IL-3 and IL-4 have the activity of inducing the proliferation of mast cells. Eosinophils that differentiate and proliferate by IL-5 and GM-CSF infiltrate into the respiratory tract by the action of eotaxin and RANTES (Allergy Asthma. Proc. 20: 141 (1999)).

[0007] Eosinophils that infiltrate into the respiratory tract release intracellular granule proteins such as activated major basic protein (MBP) and eosinophil cationic protein (ECP) as a result of degranulation (Compr. Ther. 20: 651 (1994)). These granule proteins exhibit cytotoxic activity, and thus, ablate and damage epithelial cells. The ablation of epithelial cells results in the exposure of sensory nerve endings, enhances the permeability of the epithelium, and causes the loss of the epithelium-derived smooth muscle relaxing factor. Furthermore, eosinophils are known to secrete leukotriene C4 (LTC4) and Platelet activation factor (PAF), which have the activity of enhancing bronchial smooth muscle constriction, and platelet activating factor (PAF). It has been suggested that these reactions are repeated in the body and become chronic resulting in bronchial wall thickening and respiratory hypersensitivity.

[0008] Specifically, several reports have suggested the deep involvement of IL-4 and IL-13 in allergic reactions. For example, it is known that respiratory hypersensitivity disappears in IL-4-knockout mice (Yssel, H. and Groux, H., Int. Arch. Allergy Immunol., 121: 10-18, 2000). In a mouse model, IL-13 has been shown to be involved in forming an asthma-like pathology regardless of IgE production and the Th2 type (Wills-Karp, M. et al., Science, 2822: 2258-2261, 1998; Grunig, G. et al., Science, 282: 2261-2263, 1998; Zhu, Z. et al., J. Clin. Invest., 103: 779-788, 1999). In addition, IL-4 receptors and IL-13 receptors are highly expressed in human respiratory epithelial cells and bronchial smooth muscles (Heinzmann, A. et al., Hum. Mol. Genet., 9: 549-559, 2000). Accordingly, these tissues are thought to be the targets of IL-4 and IL-13. On the other hand, SNPs present in IL-4 receptor α and IL-13 have been shown to be one of the genetic causes of allergic diseases (Mitsuyasu, H. et al., Nature Genet., 19: 119-120, 1998; Mitsuyasu, H. et al., J. Immunol., 162: 1227-1231, 1999; Kruse, S. et al., Immnol., 96: 365-371, 1999; Heinzmann, A. et al., Hum. Mol. Genet., 9: 549-559, 2000).

[0009] Furthermore, IL-4 and IL-13 have been reported to suppress the expression of the β and γ subunits of amiloride-sensitive epithelial sodium channel (ENaC) and increase the expression of cystic fibrosis transmembrane conductance regulator (CFTR) in tracheal epithelial cells. This suppresses Na⁺ release and enhances Cl secretion. As a result, water secretion is assumed to increase in the bronchial lumen (Galietta L. J. V. et al., J. Immunol. 168: 839-45 (2002)). Therapeutic agents that target the signaling molecules of IL-4 or IL-13, such as IL-4 agonists, soluble IL-4 receptor α (Borish L. C. et al., Am. J. Respir. Crit. Care Med. 160: 912-22 (1999)), soluble IL-13 receptor α2, anti-IL-13 antibodies, and anti-IL-4 antibodies, have already been clinically applied and are expected to be effective in treating bronchial asthma.

[0010] Inflammation in the respiratory tract is known to elevate the expression levels of cytokines and adhesion molecules. Genes encoding such cytokines and adhesion molecules, which participate in the onset of allergic diseases such as bronchial asthma, can be targets in drug discovery. Specifically, patients can be diagnosed for the onset of symptoms, seriousness, response to medical treatments, or such, by detecting variations in the expression levels of these genes. Furthermore, patients can be treated using a substance that controls the expression level of such genes or regulates protein activity.

[0011] There are several commercially available expectorants for removing sputum, the cause of death by suffocation in asthma. However, until recently, available expectorant types were restricted to those that contain an active SH group, and those that hydrolyze or lubricate the mucus. However, “fudosteine” (a low-molecular-weight oral drug), which was jointly developed by two Japanese pharmaceutical companies, SS Pharmaceutical Co. Ltd., and Mitsubishi Pharma Corporation, and released last December, is a pharmaceutical agent having an activity to suppress goblet cell hyperplasia.

[0012] In addition, Genaera Corporation in the United States has reported that the hCLCA1 gene is closely associated with the production of IL-9 and mucus in the mucosal epithelia in asthma patients (J. Allergy Clin. Immunol. 109: 246-50 (2002)); the hCLCA1 gene is the human counterpart of Gob-5 reported by Takeda Chemical Industries LTD., Japan (Proc. Natl. Acad. Sci. USA 98: 5175-80 (2001)). Furthermore, clinical trials have already been launched for the low-molecular-weight oral drug “LOMUCIN” that inhibits the function of this gene.

[0013] In the bronchia of asthma patients, the aggravation of the disease state induces differentiation of respiratory epithelial cells into goblet cells and proliferation of these cells. Goblet cells produce a huge glycoprotein called mucin. This protein contributes to the production of sputum, which causes breathing difficulties and is a leading cause of death in chronic bronchial asthma. The increase in the number of goblet cells, which are secretory cells, enhances secretions in the respiratory tract. Thus, such secreted material enhances the obstruction of the respiratory tract and largely contributes to the worsening of asthma symptoms. However, the mechanism underlying goblet cell differentiation in the respiratory epithelium is still unknown.

[0014] The term “chronic obstructive pulmonary disease” refers to mainly pulmonary emphysema and chronic bronchitis. Shortness of breath is a main symptom of pulmonary emphysema; cough and sputum are main symptoms of chronic bronchitis. These are the major subjective symptoms of respiratory diseases in aged patients. In addition to aging, smoking is deeply involved in the onset of chronic obstructive pulmonary diseases. In pulmonary emphysema, the walls of pulmonary alveoli at the end of bronchioles are damaged and greatly swollen; the elasticity and contractility of the walls are impaired, and thus, the lungs have difficulty contracting during exhalation. This often causes shortness of breath. In addition, bronchial disorders result in bronchial obstruction, which is caused by swollen mucous membranes, sputum, and such. In chronic bronchitis, chronic inflammation and edema in the bronchia induce differentiation of bronchial epithelial cells into goblet cells, which results in the overproduction of secretory material. This results in coughs that produce sputum. In chronic obstructive pulmonary diseases, narrowed bronchia and damaged lungs cannot be restored to the original state. Furthermore, there are about 220,000 and 1,400,00 patients with chronic obstructive pulmonary diseases in Japan and the United States, respectively, and the diseases are the fourth leading cause of death in both countries. Thus, chronic obstructive pulmonary diseases are quite serious.

[0015] There is a report suggesting the correlation between chronic obstructive pulmonary diseases and IL-13 (Zheng T. et al, J Clin. Invest.; 106,1081-1093,2000). According to this report, transgenic mice in which respiratory epithelial cells were allowed to express IL-13, developed pulmonary emphysema, inflammation, and goblet cell hyperplasia.

### SUMMARY OF THE INVENTION

[0016] As described above, in bronchial asthma or chronic obstructive pulmonary diseases, changes in respiratory epithelial cells are crucial factors constituting the disease states. One of the morbid changes of respiratory epithelial cells is the differentiation into goblet cells. An objective of the present invention is to identify genes associated with the differentiation into goblet cells. Another objective of the present invention is to provide diagnostic markers for bronchial asthma and drug discovery targets.

[0017] Drugs suppressing the differentiation into goblet cells in respiratory epithelial tissues were developed only recently. This is a new approach in drug discovery. Once the mechanism underlying the differentiation into goblet cells is elucidated, it may be possible to establish a basic treatment for bronchial asthma. Furthermore, agents that affect the process of goblet cell differentiation are predicted to be useful in the treatment of diseases involving inflammation and overproduction of mucus, such as chronic obstructive pulmonary diseases, cystic fibrosis, chronic sinusitis, bronchiectasis, diffuse panbronchiolitis, as well as asthma.

[0018] A culture method (called the “air interface (AI) method”) for differentiating human respiratory epithelial cells into goblet cells in the presence of IL-13 has been established by researchers of the Department of Geriatric and Respiratory Medicine, Tohoku University School of Medicine, Japan, who are collaborators in the present invention. Using this method, the present inventors predicted that goblet cell differentiation-associated genes can be identified by elucidating which gene expression varies in respiratory epithelial cells when stimulated by IL-13.

[0019] Conventionally, bronchial epithelial cells played a vital role in studies concerning the transport of water and electrolytes in humans and other animals. Moreover, particularly in humans, these cells have been significant in clarifying disease states of respiratory tract infections in cystic fibrosis and in establishing therapeutic methods. Over the past two decades, methods for culturing (in vitro) respiratory epithelial cells obtained from protease-treated trachea tissues have been improved by improving culture media and using growth-promoting substances. In addition, the AI method has been established, in which cilia and secretory granules can be produced in vitro by culturing cells under conditions similar to the environment around respiratory epithelial cells in vivo. In the AI method, the culture medium facing the mucous membrane side (apical side) of the cells is removed exposing cells to air while water and nutrients are supplied from the chorionic membrane side (basolateral side) (Van Scott M R., Exp Lung Res, 11: 75-94, 1986, Widdicombe J H., Am J Physiol, 258:L13-L18, 1990, Kim K C, J Biol Chem, 260: 4021-4027, 1985, Adler K B, Am J Respir Cell Mol Biol, 2:145-154, 1990).

[0020] Human bronchial epithelial cells cultured in the presence of human IL-13 using the air interface method were reported to express TGF-α (Booth B W, Adler K B, Bonner J C, Tournier F, Martin L D. Interleukin-13 induces proliferation of human airway epithelial cells in vitro via a mechanism mediated by transforming growth factor-α. Am J Respir Cell Mol Biol. December 2001; 25(6): 739-743). In addition, the ion transport ability of human bronchial epithelial cells has been evaluated in a previous report, in which cells were cultured by the air interface method in the presence of IL-13 (Danahay H, Am J Physiol Lung Cell Mol Physiol, 282: L226-L236, 2002). However, these reports make no reference to goblet cell differentiation, and have not conducted any exhaustive gene expression analyses.

[0021] Furthermore, bronchial epithelial cells of guinea pigs has been reported to differentiate into goblet cells when cultured in the presence of human IL-13 for 14 days using the air-liquid interface method (Kondo, M., Tamaoki, J., Takeyama, K., Nakata, J. and Nagai, A. Interleukin-13 induces goblet cell differentiation in a primary cell culture from Guinea pig tracheal epithelium. Am J Respir Cell Mol Biol 27, 536-541, 2002). However, there are no reports on exhaustive analyses of genes expressed in human bronchial epithelial cells cultured by the method described above.

[0022] On the other hand, the present applicants have identified eight types of allergy-associated genes whose expression levels decrease upon IL-4 or IL-13 stimulation in several lots of primary human respiratory epithelial cell cultures (Unexamined Published Japanese Patent Application No. (JP-A) 2002-191398). The applicants have also identified six types of allergy-associated genes whose expression levels greatly increase in several lots under the same conditions as described above (WO 02/052006 A1). The gene expression analyses in these two previous patent applications were carried out using a conventional culture method which induces no goblet cell differentiation.

[0023] Using oligonucleotide microarrays (GeneChip®, Affymetrix, Inc.) and air interface method, the present inventors compared the expression profiles of genes expressed in respiratory epithelial cells stimulated with IL-13 for goblet cell differentiation, with those of cells not stimulated with IL-13. The inventors selected genes whose expression levels increased by two folds or more or decreased by half or more of the initial levels as a result of the differentiation, and determined the expression levels of the genes. Then, the inventors confirmed the variation of the expression level of marker genes selected from the group described below in (a) or (b).

[0024] Furthermore, with respect to the mouse homologs of the human genes selected by the method described above, the inventors detected variations in the expression levels in respiratory hypersensitivity model mice. As a result, the variation pattern of expression levels of the mouse homologs coincided well with that of human genes.

[0025] The nucleotide sequences of the respective marker genes listed in (a) and (b) are known. The functions of the proteins encoded by each marker gene are described in the references listed in the “References” section in Tables 3-19 (increased) and Tables 20-36 (decreased) below. The nucleotide sequences of the mouse homologs of the marker genes of the present invention are also known. The functions of the proteins encoded by the mouse homologues of the respective marker genes are described in the references listed in the “References” section in Tables 40-62 (increased) and Tables 63-83 (decreased) below.

[0026] Among these groups of genes, some genes have been reported to be directly related to bronchial asthma. However, most of the genes have not been shown to be associated with an allergic disease. Furthermore, even for genes that are reported to be associated with bronchial asthma, there are no reports that focus on the aspect of combinations with other co-expressing genes whose expression levels vary at the same timing that the asthma-related genes do.

[0027] A close relationship between bronchial asthma symptoms and the marker genes of the present invention is suggested by the finding that the expression levels of marker genes vary in the differentiation process of respiratory epithelial cells into goblet cells. The relationship between the allergic response of the respiratory epithelium and the marker genes of the present invention was verified by the fact that the variation pattern of the expression levels of mouse homologs in the respiratory hypersensitivity mouse model is consistent with that in humans. Based on the findings described above, the present inventors revealed that tests for bronchial asthma or chronic obstructive pulmonary disease and screenings for therapeutic agents can be achieved by using as a marker the expression level of each marker gene or the activity of the protein encoded by each marker gene.

[0028] Specifically, the present invention relates to the following methods of testing for bronchial asthma or chronic obstructive pulmonary disease and the following methods of screening for candidate compounds for treating bronchial asthma or chronic obstructive pulmonary disease:
[0029] [1] a method of testing for bronchial asthma or chronic obstructive pulmonary disease, which comprises the steps of:
[0030] (1) determining the expression level of a marker gene in a biological sample from a subject;
[0031] (2) comparing the expression level determined in step (1) with the expression level of the marker gene in a biological sample from a healthy subject; and
[0032] (3) judging the subject to have bronchial asthma or chronic obstructive pulmonary disease when the result of the comparison in step (2) indicates that (i) the expression level of the marker gene in the subject is higher than that in the control when the marker gene is a gene according to (a) or (ii) the expression level of the marker gene in the subject is lower than that in the control when said marker gene is a gene according to (b);
[0033] wherein the marker gene is any one selected from the group according to (a) or (b):
[0034] (a) a group of genes whose expression levels increase when respiratory epithelial cells are stimulated with interleukin-13, and comprise any one of the nucleotide sequences of SEQ ID NOs: 25 to 310;
[0035] (b) a group of genes whose expression levels decrease when respiratory epithelial cells are stimulated with interleukin-13 and comprise any one of the nucleotide sequences of SEQ ID NOs: 311 to 547;
[0036] [2] the testing method according to [1], wherein the biological sample is a respiratory epithelial cell;
[0037] [3] the testing method according to [1], wherein the gene expression level is measured by PCR analysis of the cDNA;
[0038] [4] the testing method according to [1], wherein the gene expression level is measured by detecting the protein encoded by the marker gene;
[0039] [5] a reagent for testing for bronchial asthma or chronic obstructive pulmonary disease, wherein the reagent comprises a polynucleotide comprising the nucleotide sequence of a marker gene, or an oligonucleotide having at least 15 nucleotides and comprising a nucleotide sequence complementary to the complementary strand of the nucleotide sequence of the marker gene, and wherein, the marker gene is any one selected from the group according to (a) or (b) in [1];
[0040] [6] a reagent for testing for bronchial asthma or chronic obstructive pulmonary disease, wherein the reagent comprises an antibody that recognizes a protein encoded by a marker gene, and wherein the marker gene is any one selected from the group according to (a) or (b) in [1];
[0041] [7] a method of screening for a therapeutic agent for bronchial asthma or chronic obstructive pulmonary disease, wherein the marker gene is any one selected from the group according to (a) or (b) in [1], and wherein the method comprises the steps of:
[0042] (1) contacting a candidate compound with a cell expressing the marker gene;
[0043] (2) measuring the expression level of said gene; and
[0044] (3) selecting a compound that decreases the expression level of a marker gene belonging to group (a) or increases the expression level of a marker gene belonging to group (b), as compared to that in a control with which the compound has not been contacted;
[0045] [8] the method according to [7], wherein the cell is a respiratory epithelial cell or a goblet cell;
[0046] [9] the method according to [8], which comprises the step of culturing the respiratory epithelial cells under conditions in which culture medium is removed from the apical side of said cells and the culture medium is supplied from the basolateral side of the cells;
[0047] [10] a kit for screening for a candidate compound for a therapeutic agent to treat bronchial asthma or chronic obstructive pulmonary disease, wherein the kit comprises (i) a polynucleotide comprising the nucleotide sequence of a marker gene, or an oligonucleotide having at least 15 nucleotides and comprising a nucleotide sequence that is complementary to the complementary strand of the polynucleotide, and (ii) a cell expressing the marker gene, and wherein the marker gene is any one selected from the group according to (a) or (b) in [1];
[0048] [11] a kit for screening for a candidate compound for a therapeutic agent to treat bronchial asthma or chronic obstructive pulmonary disease, wherein the kit comprises (i) an antibody that recognizes a protein encoded by a marker gene, and (ii) a cell expressing the marker gene, wherein the marker gene is selected from the group according to (a) or (b) in [1];
[0049] [12] the kit according to [10] or [11], which further comprises a cell-supporting material to culture respiratory epithelial cells under conditions in which the culture medium is supplied from the basolateral side of the cells;
[0050] [13] the kit according to [12], which further comprises respiratory epithelial cells;
[0051] [14] an animal model for bronchial asthma or chronic obstructive pulmonary disease, wherein the animal is a transgenic nonhuman vertebrate wherein the expression level of a marker gene, or a gene functionally equivalent to the marker gene, has been increased in the respiratory tissue, wherein the marker gene is any one selected from the group according to (a) in [1] or the following (A):
[0052] (A) a group of genes whose expression levels increase in the lung of an animal model for bronchial hypersensitivity induced by an exposure to the ovalbumin antigen, wherein the genes comprise any one of the nucleotide sequences of SEQ ID NOs: 954 to 1174;
[0053] [15] the animal model according to [14], wherein the nonhuman vertebrate is a mouse;
[0054] [16] an animal model for bronchial asthma or chronic obstructive pulmonary disease, wherein the animal is a transgenic nonhuman vertebrate wherein the expression level of a marker gene, or a gene functionally equivalent to the marker gene, has been decreased in the respiratory tissue, wherein the marker gene is any one selected from the group according to (b) in [1] or the following (B):
[0055] (B) a group of genes whose expression levels decrease in the lung of an animal model for bronchial hypersensitivity induced by an exposure to the ovalbumin antigen, wherein the genes comprise any one of the nucleotide sequences of SEQ ID NOs: 1376 to 1515;
[0056] [17] the animal model according to [16], wherein the nonhuman vertebrate is a mouse;
[0057] [18] a method for producing an animal model for bronchial asthma or chronic obstructive pulmonary disease, which comprises the step of administering to a mouse any one of (i) to (iv):
[0058] (i) a polynucleotide comprising the nucleotide sequence constituting any one of the genes selected from the gene group according to (A) in [14];
[0059] (ii) a protein encoded by a polynucleotide comprising the nucleotide sequence constituting any one of the genes selected from the gene group according to [A] in [14];
[0060] (iii) an antisense nucleic acid of a polynucleotide comprising the nucleotide sequence constituting any one of the genes selected from the gene group according to (B) in [16], a ribozyme, or a polynucleotide that suppresses the expression of a gene through an RNAi (RNA interference) effect; and,
[0061] (iv) an antibody that binds to a protein encoded by a polynucleotide comprising the nucleotide sequence constituting any one of the genes selected from the gene group according to (B) in [16], or a fragment comprising an antigen-binding region thereof;
[0062] [19] an inducer that induces bronchial asthma in a mouse, wherein said inducer comprises as an active ingredient any one of (i) to (iv) in [18];
[0063] [20] a method of screening for a therapeutic agent for bronchial asthma or chronic obstructive pulmonary disease comprising the steps of:
[0064] (1) administering a candidate compound to an animal subject,
[0065] (2) assaying the expression level of the marker gene in a biological sample obtained from the animal subject, and
[0066] (3) selecting a compound that decreases the expression level of a marker gene belonging to group (a) or (A), or a compound that increases the expression level of a marker gene belonging to group (b) or (B), as compared to that in a control with which the candidate compound has not been contacted,
[0067] wherein the marker gene is any one selected from the group consisting of (a) or (b) in [1], (A) in [14], and (B) in [16], or a gene functionally equivalent to said marker gene;
[0068] [21] a method of screening for a therapeutic agent for bronchial asthma or chronic obstructive pulmonary disease comprising the steps of:
[0069] (1) contacting a candidate compound with a cell into which a vector has been introduced, wherein the vector comprises a transcriptional regulatory region of a marker gene and a reporter gene that is expressed under the control of the transcriptional regulatory region,
[0070] (2) measuring the activity of the reporter gene, and
[0071] (3) selecting a compound that decreases the expression level of the reporter gene when the marker gene belongs to group (a), or a compound that increases the expression level of the reporter gene when the marker gene belongs to group (b), as compared to that in a control with which the candidate compound has not been contacted,
[0072] wherein the marker gene is any one selected from the group according to (a) or (b) in [1], or a gene functionally equivalent to the marker gene;
[0073] [22] a method of screening for a therapeutic agent for bronchial asthma or chronic obstructive pulmonary disease comprising the steps of:
[0074] (1) contacting a candidate compound with a protein encoded by a marker gene,
[0075] (2) measuring the activity of the protein, and
[0076] (3) selecting a compound that decreases the activity when the marker gene belongs to group (a), or a compound that increases the activity when the marker gene belongs to the group (b), as compared to that in a control where the candidate compound has not been contacted,
[0077] wherein the marker gene is any one selected from the group according to (a) or (b) in [1], or a gene functionally equivalent to the marker gene;
[0078] [23] a therapeutic agent for bronchial asthma or chronic obstructive pulmonary disease, which comprises as an active ingredient a compound obtainable by any one of the screening methods according to [7], [20], [21], and [22];
[0079] [24] a therapeutic agent for bronchial asthma or chronic obstructive pulmonary disease, which comprises as an active ingredient a marker gene or an antisense nucleic acid corresponding to a portion of the marker gene, a ribozyme, or a polynucleotide that suppresses the expression of the gene through an RNAi effect, wherein the marker gene is any one selected from the group according to (a) in [1];
[0080] [25] a therapeutic agent for bronchial asthma or chronic obstructive pulmonary disease, which comprises as an active ingredient an antibody recognizing a protein encoded by a marker gene, wherein the marker gene is any one selected from the group according to (a) in [1];
[0081] [26] a therapeutic agent for bronchial asthma or chronic obstructive pulmonary disease, which comprises as an active ingredient a marker gene, or a protein encoded by a marker gene, wherein the marker gene is any one selected from the group according to (b) in [1]; and
[0082] [27] a DNA chip for testing for bronchial asthma or a chronic obstructive pulmonary disease, on which a probe has been immobilized to assay a marker gene, and wherein the marker gene comprises at least a single type of gene selected from group (a) and (b) in [1].

[0083] The present invention also relates to a method for treating bronchial asthma or a chronic obstructive pulmonary disease, which comprises the step of administering a compound obtainable by any one of the screening methods according to [7], [20], [21], and [22]. The present invention further relates to the use of a compound obtainable by any one of the screening methods according to [7], [20], [21], and [22] in producing pharmaceutical compositions to treat bronchial asthma or chronic obstructive pulmonary diseases.

[0084] In addition, the present invention relates to a method for treating bronchial asthma or chronic obstructive pulmonary disease, wherein the method comprises administering (i) or (ii) described below. Alternatively, the present invention relates to the use of (i) or (ii) described below, in producing pharmaceutical compositions for treating bronchial asthma or chronic obstructive pulmonary disease:
[0085] (i) a gene according to (a) described above or an antisense nucleic acid corresponding to a portion of the gene, a ribozyme, or a polynucleotide that suppresses the expression of the gene through an RNAi effect; and
[0086] (ii) an antibody recognizing a protein encoded by a gene according to (a) described above.

[0087] Furthermore, the present invention relates to a method for treating bronchial asthma or a chronic obstructive pulmonary disease, which comprises administering (iii) or (iv) described below. Alternatively, the present invention relates to the use of (iii) or (iv) described below, in producing pharmaceutical compositions to treat bronchial asthma or chronic obstructive pulmonary diseases:
[0088] (iii) a gene according to (b) described above; and
[0089] (iv) a protein encoded by a gene according to (b) described above.

### BRIEF DESCRIPTION OF THE DRAWINGS

[0090] FIG. 1 is a schematic diagram of the air interface (AI) method.

[0091] FIG. 2 is a schematic diagram showing the differences in the culture procedure between the air interface (AI) method and the immersed feeding (IMM) method.

[0092] FIG. 3 is a graph showing variations in the expression level of the pendrin gene during goblet cell differentiation when cultured by the AI method or the IMM method. The expression level (copy number/ng RNA) is indicated in the vertical axis, and the culture conditions and duration (in days) are indicated in the horizontal axis.

[0093] FIG. 4 is a graph showing the expression levels of the pendrin (PDS) gene in the lung of the mouse asthma model. The expression level (copy number/ng RNA) is indicated in the vertical axis, and the conditions used to treat mice and the number of individuals in each treated group are indicated in the horizontal axis.
[0094] naive: untreated group; S-sal: OVA antigen-sensitized, physiological saline-inhaled group; S-OVA: OVA antigen-sensitized, OVA antigen-inhaled group; Pred: OVA antigen-sensitized, OVA antigen-inhaled, Prednisolone-treated group

[0095] FIG. 5 shows micrographs (×400) to determine the localization of the PDS mRNA in the lung tissues of the mouse asthma model using in situ hybridization.

[0096] FIG. 6 shows micrographs (×400) of the lung tissues of the mouse asthma model. The tissues were subjected to hematoxylin-eosin (HE) staining, periodic acid-Schiff (PAS) staining, or Alcian Blue staining.

[0097] FIGS. 7-31 show the results of quantitative PCR assay analyses of genes whose expression levels varied in both humans and mice. The assays were carried out with ABI 7700 using cDNA of differentiated human goblet cells (human goblet cell differentiation model) or cDNA of the mouse OVA antigen-exposed bronchial hypersensitivity model. The vertical axis indicates the copy number of mRNA (copy number/ng total RNA). In the left panel, the horizontal axis indicates the culture conditions (AI method or IMM method) and duration (in days). In the right panel, the horizontal axis indicates the conditions used to treat mice and the number of antigen inhalation before collecting lung tissues.
[0098] naive: untreated group; S-sal: OVA antigen-sensitized, physiological saline-inhaled group;
[0099] S-OVA: OVA antigen-sensitized, OVA antigen-inhaled group; Pred: OVA antigen-sensitized, OVA antigen-inhaled, Prednisolone-treated group

[0100] FIG. 7 shows the assay result for the gene SCYB11. Likewise, the following Figures show the assay results for the respective genes. The symbols for the genes shown in the respective Figures are listed below.

[0101] FIG. 8: FBP1

[0102] FIG. 9: IL1RL1

[0103] FIG. 10: ALOX15

[0104] FIG. 11: ADAM8

[0105] FIG. 12: diubiquitin

[0106] FIG. 13: EPHX1

[0107] FIG. 14: RDC1

[0108] FIG. 15: IGFBP3

[0109] FIG. 16: IGFBP6

[0110] FIG. 17: S100A8

[0111] FIG. 18: CNTN1

[0112] FIG. 19: cig5

[0113] FIG. 20: SECTM1

[0114] FIG. 21: CP

[0115] FIG. 22: HEY1

[0116] FIG. 23: MGC14597

[0117] FIG. 24: UCP2

[0118] FIG. 25: STEAP

[0119] FIG. 26: LOC51297

[0120] FIG. 27: SLC34A2

[0121] FIG. 28: AQP5

[0122] FIG. 29: SLC26A4

[0123] FIG. 30: SCNN1B

[0124] FIG. 31: IL-13Ra2

[0125] FIGS. 32-69 show the results of quantitative PCR assays for genes whose expression levels varied in humans. The assays were carried out with ABI 7700 using cDNA of differentiated human goblet cells (human goblet cell differentiation model) or cDNA of the mouse OVA antigen-exposed bronchial hypersensitivity model. The vertical axis indicates the copy number of mRNA (copy numbering total RNA). In the left panel, the horizontal axis indicates the culture conditions (the AI method or the IMM method) and duration (in days). In the right panel, the horizontal axis indicates the conditions used to treat mice and the number of antigen inhalation before collecting lung tissues.
[0126] naive: untreated group; S-sal: OVA antigen-sensitized, physiological saline-inhaled group;
[0127] S-OVA: OVA antigen-sensitized, OVA antigen-inhaled group; Pred: OVA antigen-sensitized, OVA antigen-inhaled, Prednisolone-treated group

[0128] FIGS. 32-69 (varies in human)

[0129] FIG. 32 shows the assay result for the gene NOS2A. Likewise, the following figures show the assay results for the respective genes. The symbols for the genes shown in the respective figures are listed below.

[0130] FIG. 33: ISG15 (only the result for the cDNA of human goblet cell differentiation model)

[0131] FIG. 34: CH25H (only the result for the cDNA of human goblet cell differentiation model

[0132] FIG. 35: SERPINB4

[0133] FIG. 36: SERPINB2

[0134] FIG. 37: NCF2

[0135] FIG. 38: NOTCH3 (only the result for the cDNA of human goblet cell differentiation model)

[0136] FIG. 39: MDA5

[0137] FIG. 40: GBF5

[0138] FIG. 41: PRO1489 (only the result for the cDNA of human goblet cell differentiation model)

[0139] FIG. 42: MGC13102

[0140] FIG. 43: TGFB2

[0141] FIG. 44: DNAJA1

[0142] FIG. 45: SIAT1

[0143] FIG. 46: CISH

[0144] FIG. 47: AGR2 (only the result for the cDNA of human goblet cell differentiation model)

[0145] FIG. 48: MSMB (only the result for the cDNA of human goblet cell differentiation model)

[0146] FIG. 49: FLJ23516

[0147] FIG. 50: KCNMA1

[0148] FIG. 51: FLJ10298

[0149] FIG. 52: THBS1

[0150] FIG. 53: ABCC5

[0151] FIG. 54: SLC21A12 (only the result for the cDNA of human goblet cell differentiation model)

[0152] FIG. 55: SLC17A5 (only the result for the cDNA of human goblet cell differentiation model)

[0153] FIG. 56: connexin43

[0154] FIG. 57: BST2 (only the result for the cDNA of human goblet cell differentiation model)

[0155] FIG. 58: IFI9-27

[0156] FIG. 59: ICAM1

[0157] FIG. 60: periostin

[0158] FIG. 61: CDH-6

[0159] FIG. 62: DD96

[0160] FIG. 63: CTSC

[0161] FIG. 64: BENE (only the result for the cDNA of human goblet cell differentiation model)

[0162] FIG. 65: FLJ10261

[0163] FIG. 66: OAS2 (only the result for the cDNA of human goblet cell differentiation model)

[0164] FIG. 67: Odz2

[0165] FIG. 68: E48

[0166] FIG. 69: KRT16

### DETAILED DESCRIPTION OF THE INVENTION

[0167] In the present invention, the term “allergic disease” is a general term used for a disease in which an allergic reaction is involved. More specifically, for a disease to be considered allergic, the allergen must be identified, a strong correlation between exposure to the allergen and the onset of a pathological change must be demonstrated, and it should have been proven that an immunological mechanism is behind the pathological change. Herein, the term “immunological mechanism” means that leukocytes show an immune response to allergen stimulation. Examples of allergens are dust mite antigens, pollen antigens, etc.

[0168] Representative allergic diseases are bronchial asthma, allergic rhinitis, pollinosis, insect allergy, etc. Allergic diathesis is a genetic factor that is inherited from allergic parents to children. Familial allergic diseases are also called atopic diseases, and their causative factor that can be inherited is atopic diathesis.

[0169] Bronchial asthma is characterized by respiratory tract inflammation and varying degrees of airflow obstruction, and shows paroxysmal cough, wheezing, and difficulty in breathing. The degree of airflow obstruction ranges from mild to life-threatening obstructions. Such airway obstructions can be reversed at least in part either through natural healing or by treatment. Various types of cells infiltrating into the respiratory tract, such as eosinophils, T cells (Th2), and mast cells, are involved in the inflammation and the damaging of the mucosal epithelium of the respiratory tract. The reversibility of airway obstruction tends to decrease in adult patients affected by the disease for a long time. In such cases, “remodelings” such as thickening of the basement membrane under the respiratory epithelium is often seen. In sensitive patients, respiratory remodeling accompanies bronchial hypersensitivity.

[0170] Herein, a gene that can be used as a marker for bronchial asthma is referred to as “marker gene”. A protein comprising an amino acid sequence encoded by a marker gene is referred to as a “marker protein”. Unless otherwise stated, the term “marker gene” is used as a terminology that refers to one or more arbitrary gene(s) selected from the genes according to (a) or (b):
[0171] (a) a group of genes whose expression levels increase when respiratory epithelial cells are stimulated with interleukin-13, and comprise any one of the nucleotide sequences of SEQ ID NOs: 25 to 310;
[0172] (b) a group of genes whose expression levels decrease when a respiratory epithelial cell is stimulated with interleukin-13 and comprise any one of the nucleotide sequences of SEQ ID NOs: 311 to 547;

[0173] The nucleotide sequences of the marker genes of the present invention or portions of the genes are known in the art. Some of the amino acid sequences encoded by the nucleotide sequences of the marker genes of the present invention have already been identified. The GenBank accession numbers for obtaining the data of partial nucleotide sequences of the marker genes, together with names of the marker genes, are listed below. In addition, the amino acid sequences of the marker proteins are shown in Tables 84-113.

[0174] When a partial nucleotide sequence of a marker gene has been identified, one skilled in the art can determine the full-length nucleotide sequence of the marker gene based on the information of the partial nucleotide sequence. Such a full-length nucleotide sequence can be obtained, for example, through in-silico cloning. Specifically, an EST nucleotide sequence constituting a portion of a marker gene (query sequence) is compared with massive amounts of expressed sequence tag (EST) information accumulated in public databases. Based on the comparison result, information of other ESTs that share a nucleotide sequence that coincides with the query sequence over a certain length is selected. The newly selected EST information is used as a new query sequence to gain other EST information, and this is repeated. A set of multiple ESTs sharing a partial nucleotide sequence can thus be obtained by this repetition. A set of ESTs is referred to as a “cluster”. The nucleotide sequence of a gene of interest can be identified by assembling the nucleotide sequences of ESTs constituting a cluster into a single nucleotide sequence.

[0175] Furthermore, one skilled in the art can design PCR primers based on the nucleotide sequence determined through in-silico cloning. The presence of a gene comprising the determined nucleotide sequence can be verified by determining whether a gene fragment whose size is as expected is amplified by RT-PCR using such primers.

[0176] Alternatively, the result of in-silico cloning can be assessed by Northern blotting. Northern blotting is carried out using a probe designed based on the information of the determined nucleotide sequence. As a result, if a band that agrees with the above nucleotide sequence information is obtained, the presence of a gene comprising the determined nucleotide sequence can be verified.

[0177] A gene of interest can be isolated empirically, in addition to in-silico cloning. First, a cDNA clone that provided nucleotide sequence information deposited as an EST is obtained. Then, the entire nucleotide sequences of the cDNA in that clone are determined. As a result, it may be possible to determine the full-length sequence of the cDNA. At least it is possible to determine a longer nucleotide sequence. The length of the cDNA in the clone can be pre-determined empirically when the vector structure is known.

[0178] Even if the clone that provided nucleotide sequence information of an EST is unavailable, there is a method known in the art by which an unknown part of a nucleotide sequence of a gene can be obtained based on a partial nucleotide sequence of the gene. For example, in some cases, a longer nucleotide sequence can be identified by screening a cDNA library using an EST as a probe. When a cDNA library comprising many full-length cDNA is used in the screening, a full-length cDNA clone can be readily isolated. For example, a cDNA library synthesized by the oligo-capping method is known to contain many full-length cDNA.

[0179] Furthermore, there is a technique known in the art to synthesize an unknown portion of a gene, based on the information of a partial nucleotide sequence of the gene. For example, RACE is a representative technique for isolating a gene comprising an unknown nucleotide sequence. In RACE, an oligonucleotide linker is artificially ligated to one end of a cDNA. The oligonucleotide linker consists of a known nucleotide sequence. Thus, PCR primers can be designed based on the information of a portion whose nucleotide sequence is already known as an EST and the nucleotide sequence of the oligonucleotide linker. The nucleotide sequence of the unknown region can be synthesized specifically by PCR using the primers designed as described above.

[0180] The method of testing for allergic diseases of the present invention comprises measuring the expression level of each marker gene in a biological sample from a subject and comparing the level with that of the marker gene in a control biological sample. When the marker gene is one of the genes according to (a) described above and the expression level is higher than that in the control, the subject is judged to be affected with bronchial asthma or a chronic obstructive pulmonary disease. Alternatively, when the marker gene is one of the genes according to (b) described above and the expression level is lower than that in the control, the subject is judged to be affected with bronchial asthma or a chronic obstructive pulmonary disease. In the present invention, a respiratory epithelial cell which has not been stimulated with IL-13, can be used as a control. Preferably, the control respiratory epithelial cell has been cultured by the AI method.

[0181] The standard value for the control may be pre-determined by measuring the expression level of the marker gene in the control, in order to compare the expression levels. Typically, for example, the standard value is determined based on the expression level of the above-mentioned marker gene in the control. For example, the permissible range is taken as ±2S.D. based on the standard value. A technique for determining the permissible range and the standard value based on a measured value for the marker gene is known in the art. Once the standard value is determined, the testing method of the present invention may be performed by measuring only the expression level in a biological sample from a subject and comparing the value with the determined standard value for the control.

[0182] When the marker gene is one of the genes according to (a) described above and the expression level in a subject is higher than the permissible range in comparison to that in the control, the subject is judged to be affected with bronchial asthma or a chronic obstructive pulmonary disease. Likewise, when the marker gene is one of the genes according to (b) described above and the expression level in a subject is lower than the permissible range in comparison to that in the control, the subject is judged to be affected with bronchial asthma or a chronic obstructive pulmonary disease. When the expression level of the marker gene falls within the permissible range, the subject is unlikely to be affected with bronchial asthma or a chronic obstructive pulmonary disease.

[0183] In this invention, expression levels of marker genes include transcription of the marker genes to mRNA, and translation into proteins. Therefore, the method of testing for bronchial asthma or a chronic obstructive pulmonary disease of this invention is performed based on a comparison of the intensity of expression of mRNA corresponding to the marker genes, or the expression level of proteins encoded by the marker genes.

[0184] The measurement of the expression levels of marker genes in the testing for bronchial asthma or a chronic obstructive pulmonary disease of this invention can be carried out according to known gene analysis methods. Specifically, one can use, for example, a hybridization technique using nucleic acids that hybridize to these genes as probes, or a gene amplification technique using DNA that hybridize to the marker genes of this invention as primers.

[0185] The probes or primers used for the testing of this invention can be designed based on the nucleotide sequences of the marker genes. The nucleotide sequences of the marker genes and a portion of amino acid sequences encoded by the genes are known. The GenBank accession numbers for the known nucleotide sequences of the respective marker genes of the present invention are shown below in Tables 3-19 (genes showing increased expression) and Tables 20-36 (genes showing decreased expression). When a gene has a number beginning with NM in the column of RefSeq in Tables, the full-length nucleotide sequence of the gene is known in the art. When a gene does not have a number beginning with NM in the column of RefSeq, a partial nucleotide sequence can be obtained based on the GenBank Accession number of the gene. As described above, the full-length nucleotide sequence of a gene can be obtained based on the information of a known partial nucleotide sequence. In addition, with respect to some of the marker genes of the present invention, the nucleotide sequences and the amino acid sequences encoded by them are shown in the Tables.

[0186] Genes of higher animals generally accompany polymorphism in a high frequency. There are also many molecules that produce isoforms comprising mutually different amino acid sequences during the splicing process. Any gene associated with bronchial asthma or a chronic obstructive pulmonary disease that has an activity similar to that of a marker gene is included in the marker genes of the present invention, even if it has nucleotide sequence differences due to polymorphism or being an isoform.

[0187] Herein, the marker genes include homologs of other species in addition to humans. Thus, unless otherwise specified, the expression “marker gene in a species other than human” refers to a homolog of the marker gene unique to the species or a foreign marker gene which has been introduced into an individual.

[0188] As used herein, the expression “homolog of a human marker gene” refers to a gene derived from a species other than a human, which can hybridize to the human marker gene as a probe under stringent conditions. Stringent conditions typically mean hybridization in4×SSC at 65° C. followed by washing with 0.1×SSC at 65° C. for 1 hour. Temperature conditions for hybridization and washing that greatly influence stringency can be adjusted according to the melting temperature (Tm). Tm varies with the ratio of constitutive nucleotides in the hybridizing base pairs, and the composition of the hybridization solution (concentrations of salts, formamide, and sodium dodecyl sulfate). Therefore, considering these conditions, one skilled in the art can select an appropriate condition to produce an equal stringency experimentally or empirically.

[0189] An example of a homolog of the marker genes of the present invention, which is derived from another species, is the mouse homolog. Using the mouse model of bronchial hypersensitivity, the present inventors confirmed that the mouse genes according to (A) or (B) exhibit variation patterns of expression levels similar to that of human marker genes. This finding supports the fact that there is a close relationship between the human marker genes identified in the present invention and the allergic responses of tissues in the respiratory tract. This finding also supports the fact that homologs of various species can be used as marker genes of the present invention.

[0190] A polynucleotide comprising the nucleotide sequence of a marker gene or a nucleotide sequence that is complementary to the complementary strand of the nucleotide sequence of a marker gene and has at least 15 nucleotides, can be used as a primer or probe. Herein, the expression “complementary strand” means one strand of a double stranded DNA with respect to the other strand and which is composed of A:T (U for RNA) and G:C base pairs. In addition, “complementary” means not only those that are completely complementary to a region of at least 15 continuous nucleotides, but also those that have a nucleotide sequence homology of at least 70%, preferably at least 80%, more preferably 90%, and even more preferably 95% or higher. The degree of homology between nucleotide sequences can be determined by an algorithm, BLAST, etc.

[0191] Such polynucleotides are useful as a probe to detect a marker gene, or as a primer to amplify a marker gene. When used as a primer, the polynucleotide comprises usually 15 bp to 100 bp, preferably 15 bp to 35 bp of nucleotides. When used as a probe, a DNA comprises the whole nucleotide sequence of the marker gene (or the complementary strand thereof), or a partial sequence thereof that has at least 15-bp nucleotides. When used as a primer, the 3′ region must be complementary to the marker gene, while the 5′ region can be linked to a restriction enzyme-recognition sequence or a tag.

[0192] “Polynucleotides” in the present invention may be either DNA or RNA. These polynucleotides may be either synthetic or naturally-occurring. Also, DNA used as a probe for hybridization is usually labeled. Examples of labeling methods are those as described below. Herein, the term “oligonucleotide” means a polynucleotide with a relatively low degree of polymerization. Oligonucleotides are included in polynucleotides. The labeling methods are as follows:
[0193] nick translation labeling using DNA polymerase I;
[0194] end labeling using polynucleotide kinase;
[0195] fill-in end labeling using Klenow fragment (Berger, S L, Kimmel, A R. (1987) Guide to Molecular Cloning Techniques, Method in Enzymology, Academic Press; Hames, B D, Higgins, S J. (1985) Genes Probes: A Practical Approach. IRL Press; Sambrook, J., Fritsch, E F, Maniatis, T. (1989) Molecular Cloning: a Laboratory Manual, 2nd Edn. Cold Spring Harbor Laboratory Press);
[0196] transcription labeling using RNA polymerase (Melton, D A, Krieg, P A, Rebagkiati, M R, Maniatis, T, Zinn, K, Green, M R. (1984) Nucleic Acid Res., 12, 7035-7056); and
[0197] non-isotopic labeling of DNA by incorporating modified nucleotides (Kricka, L J. (1992) Non-isotopic DNA Probing Techniques. Academic Press).

[0198] Tests for bronchial asthma or a chronic obstructive pulmonary disease using hybridization techniques, can be performed using, for example, Northern hybridization, dot blot hybridization, or the DNA microarray technique. Furthermore, gene amplification techniques, such as the RT-PCR method may be used. By using the PCR amplification monitoring method during the gene amplification step in RT-PCR, one can achieve a more quantitative analysis of the expression of a marker gene of the present invention.

[0199] In the PCR gene amplification monitoring method, the detection target (DNA or reverse transcript of RNA) is hybridized to probes that are labeled with a fluorescent dye and a quencher which absorbs the fluorescence. When the PCR proceeds and Taq polymerase degrades the probe with its 5′-3′ exonuclease activity, the fluorescent dye and the quencher draw away from each other and the fluorescence is detected. The fluorescence is detected in real time. By simultaneously measuring a standard sample in which the copy number of a target is known, it is possible to determine the copy number of the target in the subject sample with the cycle number where PCR amplification is linear (Holland, P. M. et al., 1991, Proc. Natl. Acad. Sci. USA 88: 7276-7280; Livak, K. J. et al., 1995, PCR Methods and Applications 4(6): 357-362; Heid, C. A. et al., 1996, Genome Research 6: 986-994; Gibson, E. M. U. et al., 1996, Genome Research 6: 995-1001). For the PCR amplification monitoring method, for example, ABI PRISM7700 (Applied Biosystems) may be used.

[0200] The method of testing for bronchial asthma or a chronic obstructive pulmonary disease of the present invention can be also carried out by detecting a protein encoded by a marker gene. Hereinafter, a protein encoded by a marker gene is described as a “marker protein”. For such test methods, for example, the Western blotting method, the immunoprecipitation method, and the ELISA method may be employed using an antibody that binds to each marker protein.

[0201] Antibodies used in the detection that bind to the marker protein may be produced by techniques known to those skilled in the art. Antibodies used in the present invention may be polyclonal or monoclonal (Milstein, C. et al., 1983, Nature 305 (5934): 537-40). For example, a polyclonal antibody against a marker protein may be produced by collecting blood from mammals sensitized with the antigen, and separating the serum from this blood using known methods. As a polyclonal antibody, serum containing a polyclonal antibody may be used. If necessary, a fraction containing the polyclonal antibody can be further isolated from this serum. Also, a monoclonal antibody may be obtained by isolating immune cells from mammals sensitized with the antigen, fusing these cells with myeloma cells and such, cloning the resulting hybridomas, and then collecting the antibody from the hybridoma culture.

[0202] In order to detect a marker protein, such an antibody may be appropriately labeled. Alternatively, instead of labeling the antibody, a substance that specifically binds to the antibody, for example, protein A or protein G, may be labeled to detect the marker protein indirectly. More specifically, such a detection method includes the ELISA method.

[0203] A protein or a partial peptide thereof used as an antigen may be obtained, for example, by inserting a marker gene or a portion thereof into an expression vector, introducing the construct into an appropriate host cell to produce a transformant, culturing the transformant to express the recombinant protein, and purifying the expressed recombinant protein from the culture or the culture supernatant. Alternatively, the amino acid sequence encoded by a gene or an oligopeptide comprising a portion of the amino acid sequence encoded by a full-length cDNA are chemically synthesized to be used as an immunogen.

[0204] Furthermore, in the present invention, a test for an allergic disease can be performed using as an index not only the expression level of a marker gene but also the activity of a marker protein in a biological sample. Activity of a marker protein means the biological activity intrinsic to the protein. Typical methods for measuring the activity of each protein are described below.

[0205] [Protease]

[0206] A protease sample is electrophoresed under a non-reducing condition in an SDS polyacrylamide gel co-polymerized with a substrate such as gelatin. After electrophoresis, the gel is allowed to stand still in an appropriate buffer at 37° C. for 16 hours. The gel is stained with Coomassie Brilliant Blue R250 after 16 hours. The protease activity can be assessed by verifying that the electrophoretic position corresponding to the protease is not stained on the gel, i.e., gelatin at that position has been hydrolyzed.

[0207] Chen, J. M. et al., J. Biol. Chem. 266, 5113-5121 (1991)

[0208] [Protease Inhibitor]

[0209] A protease inhibitor is electrophoresed under a non-reducing condition in an SDS polyacrylamide gel co-polymerized with a protease substrate such as gelatin. After electrophoresis, the gel is allowed to stand still in an appropriate buffer containing a protease at 37° C. for 16 hours. After 16 hours, the gel is stained with Coomassie Brilliant Blue R250. The activity of the protease inhibitor can be assessed by verifying that the electrophoretic position corresponding to the protease inhibitor is not stained on the gel, i.e., gelatin has not been hydrolyzed at that position.

[0210] Greene J. et al., J. Biol. Chem. 271, 30375-30380 (1996)

[0211] [Transcription Factor]

[0212] A transcription factor is incubated at room temperature with a double-stranded oligo DNA, which has been labeled with ³²P or such and contains a target sequence of the transcription factor. The incubation allows the transcription factor to bind to the oligo DNA. After incubation, the sample is electrophoresed in a native polyacrylamide gel without SDS. The mobility of the labeled oligo DNA is determined using the radioactivity of ³²P or such as an index. When the transcription factor has the activity of binding to the oligo DNA, the mobility of the labeled oligo DNA decreases and thus the band shifts to a higher-molecular-weight position. The binding specificity for the target sequence can be assessed by verifying that an excess amount of non-labeled double-stranded oligo DNA inhibits the binding between the transcription factor and the labeled oligo DNA.

[0213] In addition, the ability to activate transcription by a transcription factor can be estimated by a procedure which comprises the steps of: co-introducing into cells of a cell line such as HeLa or HEK293, an expression vector comprising a reporter gene such as chloramphenicol acetyltransferase (CAT) downstream of a target sequence and another expression vector comprising the transcription factor gene downstream of a promoter from human cytomegalovirus (CMV), and after 48 hours, preparing a cell lysate and determining the expression level of CAT in the lysate.

[0214] Zhao F. et al., J. Biol. Chem. 276, 40755-40760 (2001)

[0215] [Kinase]

[0216] A kinase is added to a buffer (20 mM HEPES, pH7.5, 10 mM MgCl₂, 2 mM MnCl₂, 2 mM dithiothreitol, and25 μM ATP) containing myelin basic protein as a substrate, and then [γ-³²P] ATP is added thereto. The resulting mixture is incubated at 37° C. for 10 minutes. After 10 minutes, Laemmli buffer is added to stop the reaction, and the reaction solution is subjected to SDS polyacrylamide gel electrophoresis. After electrophoresis, the gel is dried and the radioactivity of the phosphorylated myelin basic protein is detected on X-ray film.

[0217] Park S Y. et al., J. Biol. Chem. 275, 19768-19777 (2000)

[0218] [Phosphatase]

[0219] A phosphatase is added to a buffer (25 mM MES (pH 5.5), 1.6 mM dithiothreitol, and 10 mM pNPP) containing p-nitrophenyl phosphate (pNPP) as a substrate. The resulting mixture is incubated at 37° C. for 30 minutes. After 30 minutes, 1N NaOH is added to stop the reaction, and the absorbance at 405 nm, a result of pNpp hydrolysis, is measured.

[0220] Aoyama K. et al., J. Biol. Chem. 276, 27575-27583 (2001)

[0221] [Chemokine and Chemokine Receptor]

[0222] Cells overexpressing a chemokine receptor are suspended in Hank's balanced salt solution containing the calcium-sensitive fluorescent dye fura-2. The cells are stimulated with the chemokine. An increase in the intracellular calcium level that resulted from the chemokine stimulation is measured with a fluorescence detector such as LS50B (Perkin Elmer).

[0223] Zhou N. et al., J. Biol. Chem. 276, 42826-42833 (2001)

[0224] [Cytokine and Cytokine Receptor]

[0225] Cells expressing a cytokine receptor are stimulated with a cytokine. The resulting cell proliferation is assessed by thymidine uptake.

[0226] Alternatively, it is possible to assess the cytokine-mediated activation of a transcription factor downstream of the cytokine receptor based on the expression of a reporter gene such as luciferase.

[0227] Piek E. et al., J. Biol. Chem. 276, 19945-19953 (2001)

[0228] [Ion Channel]

[0229] An ion channel-containing cell membrane is attached to the open end, the area of which is a few μm², of a glass pipette. The ion channel activity can be determined by the patch-clamp method which comprises measuring the electric current passing through the channel when a potential difference is generated between the inside and outside of the pipette.

[0230] Hamill, O. P. et al., Pfluegers Arch. 391, 85-100 (1981)

[0231] [Cell Adhesion Molecule]

[0232] Cells expressing an adhesion molecule on the cell surface are incubated in a plate coated with the ligand of the molecule. The number of cells adhering to the plate is determined.

[0233] Fujiwara H. et al., J. Biol. Chem. 276, 17550-17558 (2001)

[0234] [Extracellular Matrix Protein]

[0235] A suspension of cells expressing a receptor of an extracellular matrix protein such as integrin, is added to a plate coated with an extracellular matrix protein. The plate is incubated at 37° C. for 1 hour. After incubation, the cells are fixed and a DNA-binding fluorescent dye such as Hoechst 33342, is added thereto. After the reaction, the fluorescence intensity is determined using a fluorometer. The number of adhered cells quantified based on the fluorescence intensity is used to assess the activity of the extracellular matrix protein.

[0236] Miyazaki K. et al., Proc. Natl. Acad. Sci. U.S.A. 90, 11767 (1993)

[0237] Normally, a biological material collected from a subject is used as a sample in the testing method of the present invention. A preferred biological sample is blood. Blood samples include whole blood, and plasma and serum prepared from whole blood. The biological sample of the present invention includes sputum, secretions from the nasal mucous membrane, bronchoalveolar lavage fluid, exfoliated airway epithelial cells, in addition to blood. Methods for collecting biological samples are known in the art.

[0238] When the biological sample is cells such as respiratory tract epithelial cells, samples for immunological measurements of the aforementioned proteins can be made by preparing a lysate. Alternatively, samples for measuring mRNA corresponding to the aforementioned genes can be prepared by extracting mRNA from this lysate. A commercially available kit is useful when extracting a lysate or mRNA from a biological sample. Alternatively, biological samples in the liquid form such as blood, nasal mucous secretions, and bronchoalveolar lavage fluids can be made into samples for measurement of proteins and genes by diluting with a buffer and such, as necessary.

[0239] A lysate prepared from an above-mentioned biological sample can be used as a sample in immunological assays for marker proteins. Alternatively, mRNA extracted from the lysate can be used as a sample in assays for mRNA corresponding to marker genes. A commercially available kit can be used to prepare a lysate or to extract mRNA from a biological sample. When a marker protein is secreted into blood, the expression level of the encoding gene can be compared by determining the amount of the protein of interest in a sample of a subject's body fluid such as blood or serum. The sample can be diluted with a buffer or such, as required, to be used in the method of the present invention.

[0240] When mRNA is measured, the measured value of the expression levels of marker genes in the present invention can be corrected by known methods. As a result of correction, variations in gene expression levels in cells can be compared. Based on the measured values of the expression levels of genes that do not show great variations in each cell in the above biological samples (for example, housekeeping genes), the correction of the measured values is done by correcting the measured values of the expression levels of marker genes in this invention. Genes whose expression level does not greatly vary include β-actin and GAPDH.

[0241] Furthermore, the present invention provides reagents for the testing methods of the present invention. Specifically, the present invention relates to a reagent for testing bronchial asthma or a chronic obstructive pulmonary disease, which comprise a polynucleotide comprising the nucleotide sequence of a marker gene, or an oligonucleotide having at least 15 nucleotides and comprising a nucleotide sequence complementary to the complementary strand of the nucleotide sequence of the marker gene. The present invention also relates to a reagent for testing bronchial asthma or a chronic obstructive pulmonary disease, which comprises an antibody recognizing a marker protein.

[0242] The oligonucleotide or antibody constituting the reagents of the present invention can be pre-labeled with an appropriate labeling substance depending on the assay. Alternatively, the oligonucleotide or antibody constituting the reagents of the present invention can be pre-immobilized on an appropriate support depending on the assay. Furthermore, the reagents of the present invention can be prepared as test kits in combination with an additive necessary for the testing and storage, in addition to the oligonucleotide or antibody described above. Exemplary additives constituting such a kit are listed below. If required, these may be added in advance. A preservative may also be added to each.

[0243] A buffer for diluting the reagent or biological sample;
[0244] positive control;
[0245] negative control;
[0246] substrate to be used for detecting a label;
[0247] reaction vessel; and
[0248] instruction manual describing assay protocols.

[0249] The expression level of a marker gene of the present invention has been confirmed to change in respiratory epithelial cells upon IL-13 stimulation in comparison to that in non-stimulated respiratory epithelial cells. Thus, bronchial asthma or a chronic obstructive pulmonary disease can be tested using as an index the expression level of a marker gene.

[0250] Tests for bronchial asthma or a chronic obstructive pulmonary disease according to the present invention include, for example, the following. Even if a patient is not diagnosed as being affected with bronchial asthma or a chronic obstructive pulmonary disease in a routine test in spite of symptoms suggesting these diseases, whether or not such a patient is suffering from bronchial asthma or a chronic obstructive pulmonary disease can be easily determined by performing a test according to the present invention. More specifically, when the marker gene is one of the genes according to (a) mentioned above, an increase in the expression level of the marker gene in a patient whose symptoms suggest bronchial asthma or chronic obstructive pulmonary disease, implies that the symptoms are caused by bronchial asthma or a chronic obstructive pulmonary disease. Alternatively, when the marker gene is one of the genes according to (b) mentioned above, likewise, a decrease in the expression level of a marker gene in a patient whose symptoms suggest bronchial asthma or a chronic obstructive pulmonary disease, implies that the symptoms are caused by bronchial asthma or a chronic obstructive pulmonary disease.

[0251] In addition, the present invention facilitates tests to determine whether bronchial asthma or a chronic obstructive pulmonary disease is improving in a patient. In other words, the present invention can be used to judge the therapeutic effect on bronchial asthma or a chronic obstructive pulmonary disease. Furthermore, when the marker gene is one of the genes according to (a), an increase in the expression level of the marker gene in a patient, who has been diagnosed as being affected by bronchial asthma or a chronic obstructive pulmonary disease, implies that the disease has progressed more. Alternatively, when the marker gene is one of the genes according to (b), likewise a decrease in the expression level of the marker gene in a patient, who has been diagnosed as being affected by bronchial asthma or a chronic obstructive pulmonary disease, implies that the disease has progressed more.

[0252] Furthermore, the severity of bronchial asthma or a chronic obstructive pulmonary disease may also be determined based on the difference in expression levels. In other words, when the marker gene is one of the genes according to (a), the degree of increase in the expression level of the marker gene is correlated with the severity of bronchial asthma or chronic obstructive pulmonary disease. Alternatively, when the marker gene is one of the genes according to (b), the degree of decrease in the expression level of the marker gene is correlated with the severity of bronchial asthma or chronic obstructive pulmonary disease.

[0253] The present invention also relates to animal models for bronchial asthma or chronic obstructive pulmonary disease, comprising a nonhuman transgenic animal in which the expression level of a marker gene according to (a) or a gene functionally equivalent to the marker gene has been elevated in the respiratory epithelium.

[0254] The present invention revealed that stimulation with IL-13 increased the expression level of a marker gene according to (a) in respiratory epithelial cells. Thus, an animal in which the expression level of a marker gene according to (a) or a gene functionally equivalent to the marker gene in respiratory epithelial cells has been artificially increased, can be used as an animal model for bronchial asthma or chronic obstructive pulmonary diseases.

[0255] The present invention also relates to an animal model for bronchial asthma or chronic obstructive pulmonary disease, which is a nonhuman transgenic animal in which the expression level of a marker gene according to (b), or a gene functionally equivalent to the marker gene, has been decreased in respiratory epithelial cells.

[0256] The present invention revealed that stimulation with IL-13 decreased the expression level of a marker gene according to (b) in respiratory epithelial cells. Thus, an animal in which the expression level of a marker gene according to (b) or a gene functionally equivalent to the marker gene in respiratory epithelial cells has been artificially decreased can be used as an animal model for bronchial asthma or chronic obstructive pulmonary disease.

[0257] A “functionally equivalent gene” as used in this invention is a gene that encodes a protein having an activity similar to a known activity of a protein encoded by the marker gene. A representative example of a functionally equivalent gene includes a counterpart of a marker gene of a subject animal, which is intrinsic to the animal.

[0258] For example, genes according to group (A) and group (B) described above are functionally equivalent mouse genes. The genes according to group (A) and group (B) described above are used as preferred marker genes in performing the screenings according to the present invention using mice.

[0259] In addition, the present invention identified the mouse counterpart genes of the marker genes according to (a) and (b). Such counterpart genes are shown in (A) and (B), respectively. These counterparts are genes whose expression levels in respiratory epithelial cells showed a twofold or more difference between the mouse model for bronchial asthma and normal mice. Thus, an animal model for bronchial asthma can be created by controlling the expression level of a counterpart gene or administering a counterpart gene. Namely, the present invention relates to a method for creating an animal model for bronchial asthma or a chronic obstructive pulmonary disease by controlling the expression level of a gene selected from the group of genes according to (A) or (B). Alternatively, the present invention relates to a method for creating an animal model for bronchial asthma or a chronic obstructive pulmonary disease by administering the protein encoded by a gene selected from the group of genes according to (A) or (B), or administering an antibody against the protein.

[0260] First, similarly to the group of genes according to (a), the group of genes according to (A) can induce bronchial asthma or a chronic obstructive pulmonary disease by the increase in their expression levels. Alternatively, an animal model for bronchial asthma or chronic obstructive pulmonary disease can be created by introducing a gene selected from such groups of genes, or by administering a protein encoded by such a gene. Such counterpart genes or proteins are preferably introduced/administered to mice, because they derive from mice.

[0261] In addition, similarly to the group of genes according to (b), the group of genes according to (B) can induce bronchial asthma or chronic obstructive pulmonary disease by the suppression of their expression levels. Alternatively, bronchial asthma or chronic obstructive pulmonary disease can be induced by suppressing the expression of a gene selected from such groups of genes or the activity of a protein encoded by such a gene. An antisense nucleic acid, a ribozyme, or an RNAi can be used to suppress the expression. The activity of a protein can be controlled effectively by administering a substance that inhibits the activity, such as an antibody. Namely, in an animal inherently having a gene selected from the group of genes according to (B), i.e., mice, bronchial asthma or chronic obstructive pulmonary disease is induced by administering such a substance.

[0262] The animal model for bronchial asthma or chronic obstructive pulmonary disease is useful for detecting physiological changes due to bronchial asthma or chronic obstructive pulmonary disease. Furthermore, the use of the animal model for bronchial asthma or chronic obstructive pulmonary disease to reveal additional functions of marker genes and evaluate drugs whose targets are the marker genes, also have a great significance.

[0263] In addition, the animal model for bronchial asthma or chronic obstructive pulmonary disease of the present invention can be used to elucidate the mechanism underlying bronchial asthma or chronic obstructive pulmonary disease and also to test the safety of compounds obtained by screening. For example, when an animal model for bronchial asthma or chronic obstructive pulmonary disease according to the present invention develops the symptoms of asthma or chronic obstructive pulmonary disease, or when a measured value involved in a certain allergic disease alters in the animal, a screening system can be constructed to explore compounds having activity to alleviate the disease.

[0264] As used herein, the expression “an increase in the expression level” refers to any one of the following: where a marker gene introduced as a foreign gene is expressed artificially; where the transcription of a marker gene intrinsic to the subject animal and the translation thereof into the protein are enhanced; or where the hydrolysis of the protein, which is the translation product, is suppressed.

[0265] As used herein, the expression “a decrease in the expression level” refers to either the state in which the transcription of a marker gene of the subject animal and the translation thereof into the protein are inhibited, or the state in which the hydrolysis of the protein, which is the translation product, is enhanced. The expression level of a gene can be determined, for example, by a difference in signal intensity on a DNA chip as shown below in the Example. Furthermore, the activity of the translation product—the protein—can be determined by comparing with that in the normal state.

[0266] Representative transgenic animals include: animals to which a marker gene has been introduced and expressed artificially; marker gene knockout animals; and knock-in animals in which another gene has been substituted for a marker gene. A transgenic animal, into which an antisense nucleic acid of a marker gene, a ribozyme, a polynucleotide having an RNAi effect, or a DNA functioning as a decoy nucleic acid or such has been introduced, can be used as the transgenic animal of the present invention. Such transgenic animals also include, for example, animals in which the activity of a marker protein has been enhanced or suppressed by introducing a mutation(s) into the coding region of the gene, or the amino acid sequence has been modified to become resistant or susceptible to hydrolysis. Mutations in an amino acid sequence include substitutions, deletions, insertions, and additions. In addition, the expression itself of a marker gene of the present invention can be controlled by introducing a mutation(s) into the transcriptional regulatory region of the gene.

[0267] An amino acid substitution is preferably a “conservative amino acid substitution” —a mutation of an amino acid into a different amino acid that conserves the properties of the amino acid side-chain—. A “conservative amino acid substitution” is a replacement of one amino acid residue belonging to one of the following groups having a chemically similar side chain with another amino acid in the same group. Groups of amino acid residues having similar side chains have been defined in the art. These groups include amino acids with basic side chains (e.g., lysine, arginine, histidine), acidic side chains (e.g., aspartic acid, glutamic acid), uncharged polar side chains (e.g., glycine, asparagine, glutamine, serine, threonine, tyrosine, cysteine), nonpolar side chains (e.g., alanine, valine, leucine, isoleucine, proline, phenylalanine, methionine, tryptophan), beta-branched side chains (e.g., threonine, valine, isoleucine) and aromatic side chains (e.g., tyrosine, phenylalanine, tryptophan, histidine).

[0268] The number of amino acids that are mutated is not particularly restricted, as long as the activity is maintained. Normally, it is within 50 amino acids, preferably within 30 amino acids, more preferably within 10 amino acids, and even more preferably within 3 amino acids. The site of mutation may be any site, as long as the activity is maintained.

[0269] Methods for obtaining transgenic animals by targeting a particular gene are known. That is, a transgenic animal can be obtained by any of the following methods: mixing a gene and ovum and treating with calcium phosphate; introducing a gene directly into the nucleus of an oocyte in a pronuclei with a micropipette under a phase contrast microscope (microinjection method, U.S. Pat. No. 4,873,191); or using embryonic stem cells (ES cells). Furthermore, a method for infecting ovum with a gene-inserted retroviral vector, the sperm vector technique for transducing a gene into ovum via sperm, or such, have also been developed. The sperm vector technique is a gene recombination technique for introducing a foreign gene by fertilizing ovum with sperm after a foreign gene has been incorporated into sperm by adhesion or the electroporation method, etc. (M. Lavitrano, et al., Cell, 57, 717, 1989).

[0270] When a promoter whose transcription activity is controlled by a substance such as an appropriate drug is used in the expression vector, the expression level of a foreign marker gene can be regulated by administering the substance to the transgenic animal.

[0271] Transgenic animals used as the animal model for bronchial asthma or chronic obstructive pulmonary disease of the present invention can be produced using all vertebrates except humans. More specifically, transgenic animals having various transgenes or modified gene expression levels are being produced using vertebrates such as mice, rats, rabbits, miniature pigs, goats, sheep, monkeys, dogs, cats, or cattle.

[0272] In addition, the present invention relates to screening methods for candidate compounds for therapeutic agents to treat bronchial asthma or chronic obstructive pulmonary disease. According to the present invention, a marker gene is selected from the group according to the above (a) or (b). When the gene is selected from the group according to (a), the expression level is significantly elevated in respiratory epithelial cells stimulated with IL-13 in comparison with unstimulated respiratory epithelial cells. When the gene is selected from the group according to (b), the expression level is significantly decreased in respiratory epithelial cells stimulated with IL-13 in comparison with unstimulated respiratory epithelial cells.

[0273] Thus, when the marker gene belongs to group (a), a therapeutic agent for bronchial asthma or chronic obstructive pulmonary disease can be obtained by selecting a compound capable of decreasing the expression level of the marker gene. On the other hand, when the marker gene belongs to group (b), a therapeutic agent for bronchial asthma or chronic obstructive pulmonary disease can be obtained by selecting a compound capable of increasing the expression level of the marker gene.

[0274] As used herein, the expression “a compound that increases the expression level of a gene” refers to a compound that promotes any one of the steps of gene transcription, gene translation, or expression of a protein activity. On the other hand, the expression “a compound that decreases the expression level of a gene”, as used herein, refers to a compound that inhibits any one of these steps.

[0275] A method of screening for a therapeutic agent for an allergic disease of this invention can be carried out either in vivo or in vitro. This screening method can be performed, for example, according to the steps as described below:
[0276] (1) administering a candidate compound to an animal subject;
[0277] (2) measuring the expression level of a marker gene in a biological sample from the animal subject;
[0278] (3) selecting a compound that decreases the expression level of a marker gene belonging to group (a), or a compound that increases the expression level of a marker gene belonging to group (b), as compared to that in a control with which the candidate compound has not been contacted;

[0279] In the screening methods of the present invention, a gene functionally equivalent to any one of the genes selected from the group according to (a) or (b) described above, can be used as a marker gene. A representative example of a functionally equivalent gene includes a counterpart marker gene of a subject animal, which is intrinsic to the animal.

[0280] An animal used in the screening method of the present invention includes, for example, an animal model for bronchial asthma known in the art. For example, the animal model for ovalbumin (hereinafter abbreviated as “OVA”) antigen-exposed bronchial hypersensitivity has been reported as an animal model for bronchial asthma. Bronchial hypersensitivity can be induced as follows: 50 μg OVA and 1 mg aluminum hydroxide as an adjuvant are injected into the peritoneal cavity of Balb/c mice (male, seven-week old), and after 10 days, the mice are sensitized with OVA by the same procedure. Then, after 10 days, 1% OVA is given to the mice by inhalation using Ultra-nebulizer model UN701 (Azwell, Inc.) for 30 minutes every four days three times in total. The enhanced bronchial hypersensitivity is monitored by detecting respiratory constriction caused by acetylcholine (6.25-2000 mg/kg) using a respirator (model 131, New England Medical Instruments Inc.) 24 hours after the final antigen inhalation (Nagai H. et al, Int Arch Allergy Immunol; 108: 189-195, 1995).

[0281] Furthermore, an animal model for chronic obstructive pulmonary disease is also known in the art. The animal model can be created using mice, rats, rabbits, miniature pigs, dogs, horses, etc. For example, an animal model for chronic obstructive pulmonary disease, which develops symptoms such as pulmonary emphysema, can be created by giving erastase to a New Zealand white rabbit three times by inhalation (Brenner M. et al., Chest, 121, 201-209, 2002). The screening according to the present invention can be practiced by administering a candidate compound to such an animal model and then monitoring variations in the expression level of a marker gene of the present invention.

[0282] A screening method using an animal model typically comprises monitoring the expression level of a marker gene that is inherently contained in the animal model. Thus, for example, the expression level of the mouse homolog of a marker gene is measured when the screening method uses a mouse model. Mouse genes according to (A) are genes whose expression levels are elevated in respiratory tissues of an OVA antigen-exposed bronchial hypersensitivity mouse model. On the other hand, mouse genes according to (B) are genes whose expression levels are decreased in respiratory tissue of the same mouse model. These mouse homolog genes can be used as marker genes in the screening methods of the present invention.

[0283] In addition to mouse homologs, one skilled in the art can identify similar homologs of various animal species based on the disclosure of the present invention. For example, various genes (or proteins) exhibiting a high homology to the nucleotide sequence or the amino acid sequence of a human marker gene or a mouse homolog can be identified by using homology searches. Alternatively, such homologs derived from other species can be isolated by hybridization to the marker gene.

[0284] However, with respect to screening methods comprising an animal model to which a human gene has been introduced, not only animal homologs but also human genes may be measured as marker genes.

[0285] Thus, the influence of a candidate compound for a pharmaceutical agent on the expression level of a marker gene can be assessed by contacting an animal subject with the candidate compound and monitoring the effect of the compound on the expression level of the marker gene in a biological sample derived from the animal subject. The variation in the expression level of the marker gene in a biological sample derived from the animal subject can be monitored using the same technique as used in the testing method of the present invention described above. Furthermore, based on the evaluation, a candidate compound for a pharmaceutical agent can be selected by screening. A compound that decreases the expression level is selected as a candidate compound for a pharmaceutical agent, when the marker gene is any one of the genes according to group (a); a compound that increases the expression level is selected as a candidate compound for a pharmaceutical agent, when the marker gene is any one of the genes according to group (b).

[0286] More specifically, a screening according to the present invention can be achieved by collecting respiratory epithelial cells as a sample from an animal subject, and comparing the expression level of a marker gene between the sample and a control with which the candidate compound has not been contacted. Methods for collecting and preparing respiratory epithelial cells are known in the art.

[0287] An animal subject may be stimulated with an allergen or IL-13 in a screening method of the present invention using an animal subject. The screening can be conducted by administering the candidate compound before or after the stimulation, or simultaneously, and comparing the expression level of a marker gene with that in a control. As a result, an effect of the candidate compound on the expression of a marker gene that responds to such stimulation can be evaluated. A compound having an activity to regulate the response of a marker gene to a stimulation with an allergen or IL-13 can be obtained through the screening.

[0288] These screening methods enable the selection of drugs involved in the expression of marker genes in various ways. More specifically, for example, drug candidate compounds having the following actions can be found:

[0289] When a marker gene belongs to group (a):
[0290] suppression of a signal transduction pathway to induce the expression of the marker gene;
[0291] suppression of the transcription activity of the marker gene; and
[0292] inhibition of the stabilization of the transcription product of the marker gene or promotion of the decomposition thereof, etc;

[0293] When a marker gene belongs to group (b):
[0294] activation of a signal transduction pathway to induce the expression of a marker gene;
[0295] promotion of the transcription activity of the marker gene; and
[0296] stabilization of the transcription product of the marker gene or inhibition of the decomposition thereof, etc;

[0297] Furthermore, methods of in vitro screening include, for example, a method that comprises contacting cells expressing a marker gene with a candidate compound and selecting a compound that decreases the expression level of a gene when the gene belongs to group (a), or alternatively selecting a compound that increases the expression level of a gene when the gene belongs to group (b). The screening can be conducted, for example, according to a method comprising the steps of:
[0298] (1) contacting a candidate compound with a cell expressing the marker gene;
[0299] (2) measuring the expression level of said gene; and
[0300] (3) selecting a compound that decreases the expression level of a marker gene belonging to group (a) or increases the expression level of a marker gene belonging to group (b), as compared to that in a control with which the compound has not been contacted;

[0301] In the present invention, cells expressing a marker gene can be obtained by inserting the marker gene to an appropriate expression vector, and introducing said vector into a suitable host cell. Any vector and host cell may be used as long as it is able to express a marker gene of this invention. Examples of host cells in the host-vector system are Escherichia coli, yeast, insect cells, animal cells, and such, and vectors that can be used for respective host cells can be appropriately selected.

[0302] Vectors may be introduced into hosts by a biological, physical, or chemical method, or such. Examples of biological methods are methods using viral vectors, methods using specific receptors, and cell-fusion methods (HVJ (Sendai virus) method, polyethylene glycol (PEG) method, electric cell fusion method, microcell-mediated chromosome transfer). Examples of physical methods are the microinjection method, electroporation method, and the method using the gene particle gun (gene gun). Examples of chemical methods are the calcium phosphate precipitation method, liposome method, DEAE-dextran method, protoplast method, erythrocyte ghost method, erythrocyte membrane ghost method, and microcapsule method.

[0303] In a screening method of the present invention, cells constituting respiratory tissues, such as epithelial cells and goblet cells can be used as cells expressing a marker gene. More specifically, epithelial cells, goblet cells, endothelial cells, smooth muscle cells, fibroblast cells, mucosal cells, and so on can be used.

[0304] Cells constituting respiratory tissues include a cell line established from the respiratory epithelium. Such a cell line can be used preferably in practicing a screening method of the present invention, because homogeneous cells can be prepared on a large scale and the cells can be cultured by a simple method. Such a respiratory epithelial cell line can be established, for example, by the following procedure. Namely, cells are collected from the lung, trachea, or mucous membrane by protease treatment or such. In some cases, cells can be immortalized and established as cell lines through infection of a virus such as Hepatitis B virus (HBV). A previously established cell line can be used in a screening according to the present invention. Cell lines from the respiratory epithelium, which can be used in the present invention, are listed below. The corresponding accession numbers in the ATCC cell bank are shown within parentheses.

[0305] Human lung cancer cell A549 (ATCC No. CCL-185)
[0306] SHP-77 (ATCC No. CRL-2195)

[0307] Human bronchial epithelial cell BEAS-2B (ATCC No. CRL-9609)
[0308] HBE4-E6/E7 (ATCC No. CRL-2078)
[0309] NL20 (ATCC No. CRL-2503)
[0310] NCI-H727 (ATCC No. CRL-5815)
[0311] MeT-5A (ATCC No. CRL-9444)
[0312] BBM (ATCC No. CRL-9482)
[0313] BZR (ATCC No. CRL-9483)

[0314] Human mucosal endothelial cell NCI-H292 (ATCC No. CRL-1848)

[0315] A screening method of the present invention can be practiced by contacting a candidate compound with cells of a respiratory epithelial cell line described above and measuring the expression level of a marker gene within the cells. Based on the assay result, a compound that decreases the expression level of the gene is selected when the marker gene belongs to group (a), or a compound that increases the expression level of the gene is selected when the marker gene belongs to group (b), in comparison with a control with which the candidate compound has not been contacted.

[0316] When used in a screening method of the present invention, respiratory epithelial cells can be cultured by using a method known in the art. It is preferable to use the AI method described above to culture respiratory epithelial cells. As used herein, the term the “AI method” refers to a culture method in which respiratory epithelial cells are in contact with air on the apical side and the culture medium is supplied from the basolateral membrane side. The term “air” in the AI method refers to air containing 5% CO₂ gas, which is typically used in culturing mammalian cells. In the AI method, the air is used after being sterilized with a filter.

[0317] Animal cells are typically cultured in a culture medium under a constant concentration of CO₂. However, in the AI method, respiratory epithelial cells are cultured in contact with air. The difference between the AI method and the IMM method, which is a conventional culture method for respiratory epithelial cells, is schematically illustrated in FIG. 2.

[0318] When cultured by the AI method, respiratory epithelial cells differentiate into goblet cells upon IL-13 stimulation. Thus, the possibility of selecting a compound having an effect on the process of goblet cell differentiation can be increased by pre-culturing respiratory epithelial cells using the AI method. In a screening method of the present invention, respiratory epithelial cells can be treated with IL-13. Specifically, respiratory epithelial cells may be treated with IL-13 before or after contacting a candidate compound with the respiratory epithelial cells, or simultaneously.

[0319] When cultured by the AI method, respiratory epithelial cells differentiate into goblet cells upon IL-13 stimulation. Thus, an influence of a candidate compound on the expression level of a marker gene that is expressed in the process of goblet cell differentiation can be determined by monitoring as an index, the effect of the candidate compound on respiratory epithelial cells stimulated with IL-13.

[0320] The culture method for respiratory epithelial cells according to the AI method is known in the art. For example, respiratory epithelial cells can be cultured by the AI method based on disclosures in the reports indicated below.

[0321] Yamaya M.; Kokyu Vol. 12 No. 10, pp. 1238-1243 (1993);

[0322] Yamaya et al., Am. J. Physiol. 262 (Lung Cell Mol. Physiol. 6): L713-L724 (1992)

[0323] More specifically, first, tissues of the respiratory epithelium are collected from a living body, and a suspension of respiratory epithelial cells is prepared by protease treatment. A respiratory epithelial cell line may also be used. Respiratory epithelial cells from any mammalian species including humans can be used for the screening methods of the present invention. The resulting respiratory epithelial cells are cultured on a support. A preferred cell density of respiratory epithelial cells on the support falls within about 10⁴-10⁸ cells/cm², preferably within about 10⁶ cells/cm². Excess cells flowing out of the support are removed and the remaining is further cultured.

[0324] A material that can hold respiratory epithelial cells and supply components of the culture medium to the cells from the bottom of the cell layer, is used as a support. For example, a filter with pores whose size is too small for cells to pass through is preferably used as a support in the AI method. The filter used as a support may be coated with a material having affinity for the cells. Such materials include, for example, collagen gel. In the Examples, a commercially available filter (Millipore; Millicell-HA) coated with Vitrogen gel (CELTRIX; Vitrogen was used after gelation) is used in the AI method. The filter is attached to the bottom of an appropriate cuvette. When a suspension of respiratory epithelial cells is added to the cuvette, a cell layer is formed on the filter. Then, the culture according to the AI method can be done by floating the collagen gel-coated cuvette in a well filled with a medium.

[0325] A typical culture medium for respiratory epithelial cells may be used in the culture according to the present invention. Specifically, such a medium includes a culture medium comprising a 1:1 mixture of Dulbecco's MEM and Ham F12, which contains 2% Ultroser G, and the following antibiotics: penicillin, streptomycin, gentamycin, and amphotericin B.

[0326] Thus, the culture according to the AI method can be practiced by adhering cells to the above-mentioned filter, continuing culture in a state in which the filter side contacts the medium and the cell side contacts air. A test compound or IL-13 can be contacted with respiratory epithelial cells by adding it to the medium. In the AI method, IL-13 is added to the medium typically at the concentration of 5-100 ng/mL, preferably of 30-80 ng/mL, for example, of 50 ng/mL in order to stimulate respiratory epithelial cells. It is preferable to use IL-13 derived from the same species from which the respiratory epithelial cells are derived.

[0327] In the screening method of this invention, expression levels of marker genes can be compared not only based on the expression levels of proteins encoded by the genes, but also based on the corresponding mRNAs detected. For performing the comparison of expression levels using mRNA, the process for preparing an mRNA sample as described above is carried out in place of the process for preparing a protein sample. Detection of mRNA and protein can be performed by known methods as described above.

[0328] Furthermore, based on the disclosure of this invention, it is possible to obtain a transcriptional regulatory region for a marker gene of this invention and construct a reporter assay system. A reporter assay system is a system for screening for a transcriptional regulatory factor that acts on a transcriptional regulatory region using as an index the expression level of a reporter gene localized downstream of the transcriptional regulatory region.

[0329] Specifically, the present invention relates to a method of screening for therapeutic agents for bronchial asthma or chronic obstructive pulmonary disease, in which a marker gene is any one selected from the group according to (a) or (b), or a gene functionally equivalent to the marker gene, which method comprises the steps of:
[0330] (1) contacting a candidate compound with a cell into which a vector containing a transcriptional regulatory region of a marker gene and a reporter gene under the control of the transcriptional regulatory region have been introduced;
[0331] (2) measuring the activity of said reporter gene; and
[0332] (3) selecting a compound that decreases the expression level of said reporter gene when the marker gene belongs to group (a), or a compound that increases the expression level of said reporter gene when the marker gene belongs to group (b), as compared to that in a control with which the candidate compound has not been contacted;

[0333] Examples of transcription regulatory regions are promoters, enhancers, and furthermore, CAAT box and TATA box, which are normally seen in the promoter region.

[0334] Also, as reporter genes, CAT (chloramphenicol acetyltransferase) gene, luciferase gene, growth hormone genes, and such may be used.

[0335] Alternatively, a transcription regulatory region of each marker gene of this invention can be obtained as follows. That is, first, a screening is performed by a method that uses PCR or hybridization based on the nucleotide sequences of marker gene cDNA disclosed in this invention, and a genomic DNA clone containing the cDNA sequence is obtained from a human genome DNA library such as the BAC library or YAC library. Based on the obtained genomic DNA sequence, the transcription regulatory region of a cDNA disclosed in this invention is estimated, and the transcription regulatory region is obtained. A reporter construct is constructed by cloning the obtained transcription regulatory region so that it is positioned upstream of the reporter gene. The obtained reporter construct is transfected into a cultured cell strain and is made into a transformant for screening. A candidate compound is contacted with this transformant. The screening of this invention can be performed by selecting a compound capable of decreasing the expression level of a marker gene when the gene belongs to group (a); or selecting a compound capable of increasing the expression level of a marker gene when the marker gene belongs to group (b).

[0336] A screening method based on the activity of a marker gene can be used as an in vitro screening method of the present invention. Specifically, the present invention relates to a method of screening for a therapeutic agent for bronchial asthma or chronic obstructive pulmonary disease, in which the marker gene is any one selected from the group according to (a) or (b), or a gene functionally equivalent to the marker gene, which method comprises the steps of:
[0337] (1) contacting a candidate compound with the protein encoded by a marker gene;
[0338] (2) measuring the activity of said protein; and
[0339] (3) selecting a compound that decreases said activity when the marker gene belongs to group (a), or a compound that increases said activity when the marker gene belongs to group (b), as compared to that in a control with which the candidate compound has not been contacted.

[0340] A compound having the activity of inhibiting the activity of a marker protein of the present invention can be selected through screening using the activity as an index, when the marker gene belongs to group (a). Such a compound that can be obtained as described above suppresses the activity of the respective marker gene belonging to group (a). Thus, the compound can control bronchial asthma or chronic obstructive pulmonary disease by inhibiting the marker protein whose expression has been induced in respiratory epithelial cells.

[0341] A compound having the activity of enhancing the activity of a marker protein can be selected through screening using the activity as an index, when the marker gene belongs to group (b). Such a compound that can be obtained as described above enhances the activity of the respective marker gene belonging to group (b). Thus, the compound can control bronchial asthma or chronic obstructive pulmonary disease by activating the marker protein whose expression has been inhibited in respiratory epithelial cells.

[0342] In addition to compound preparations synthesized by existing chemical methods, such as steroid derivatives and compound preparations synthesized by combinatorial chemistry, candidate test compounds used in such screenings include, mixtures of multiple compounds such as extracts from animal or plant tissues, or microbial cultures, and their purified preparations.

[0343] A polynucleotide, antibody, cell strain, or model animal necessary for various screening methods according to this invention can be combined in advance into a kit. A substrate compound used for the detection of a marker, a medium and vessel for cell culturing, positive and negative standard samples, and furthermore, a manual describing how to use the kit, may also be packaged in the kit. For example, such a kit may have a combination of a filter or a filter-attached cuvette to be used in the culture of respiratory epithelial cells according to the AI method, a culture well in which the cuvette is installed and the culture is maintained, a culture medium, and such.

[0344] A compound selected by a screening method of the present invention can be used as a therapeutic agent for bronchial asthma or chronic obstructive pulmonary disease. An antisense nucleic acid or a ribozyme capable of suppressing the expression level of a marker gene according to (a), or a polynucleotide that suppresses the expression of the gene through an RNAi effect can also be used as a therapeutic agent for bronchial asthma or chronic obstructive pulmonary disease.

[0345] Furthermore, an antibody recognizing a peptide comprising the amino acid sequence of a protein encoded by any one of the genes according to (a) can also be used as a therapeutic agent for bronchial asthma or chronic obstructive pulmonary disease. Each marker gene according to (a) is a gene whose expression level is increased in respiratory epithelial cells stimulated with IL-13. Thus, a therapeutic effect on bronchial asthma or chronic obstructive pulmonary disease can be achieved by suppressing the expression of the genes or the function of proteins encoded by the genes.

[0346] In addition, any marker gene according to (b) and the protein encoded by the gene can be used as a therapeutic agent for bronchial asthma or chronic obstructive pulmonary disease.

[0347] A therapeutic agent for an allergic disease according to this invention can be formulated by including a compound selected by a screening method of the present invention as an active ingredient, and mixing it with a physiologically acceptable carrier, excipient, diluent, or such. The therapeutic agent can be administered orally or parenterally to ameliorate the allergy symptoms.

[0348] Oral drugs can take any dosage form selected from the group of granules, powders, tablets, capsules, solutions, emulsions, suspensions, etc. Injections can include subcutaneous injections, intramuscular injections, or intraperitoneal injections.

[0349] Furthermore, when the compound to be administered comprises a protein, a therapeutic effect can be achieved by introducing a gene encoding the protein into the living body using gene therapy techniques. Techniques for treating diseases by introducing a gene encoding a therapeutically effective protein into the living body and expressing it therein are known.

[0350] Alternatively, an antisense nucleic acid, a ribozyme, or a polynucleotide that suppresses the expression of a corresponding gene by an RNAi effect can be incorporated downstream of an appropriate promoter sequence to be administered as an expression vector of an antisense RNA, a ribozyme, or an RNA having the RNAi effect. When this expression vector is introduced into mononuclear cells of an allergy patient, the therapeutic effect on the allergy can be achieved by reducing the expression level of the gene by expressing a corresponding antisense nucleic acid, ribozyme, or polynucleotide that suppresses the expression of a corresponding gene by an RNAi effect. In vivo or ex vivo methods are known for introducing the expression vector into mononuclear cells.

[0351] The expression “antisense RNA” refers to an RNA comprising a nucleotide sequence complementary to the sense sequence of a gene. When an antisense RNA is used to suppress gene expression, such an RNA typically comprises a nucleotide sequence of 15 or more consecutive nucleotides, for example, 20 or more consecutive nucleotides, or 30 or more consecutive nucleotides. For example, an antisense nucleic acid capable of hybridizing to a region comprising an initiation codon is thought to be highly effective in suppressing the expression of the corresponding gene.

[0352] The term “ribozyme” refers to an RNA that has the catalytic activity of digesting RNA in a nucleotide sequence-specific manner. There are two types of ribozymes: hammerhead ribozymes and hairpin ribozymes. Both ribozymes are composed of a nucleotide sequence portion complementary to the region to be digested and a nucleotide sequence portion that maintains the structure required for the catalytic activity. The nucleotide sequence complementary to the region to be digested can be arbitrary. Therefore, when the nucleotide sequence of this region is set to be complementary to the nucleotide sequence of a target gene, a ribozyme can be designed to control the expression of a marker gene.

[0353] The expression “RNAi (RNA interference) effect” refers to the phenomenon where a double-stranded RNA comprising a nucleotide sequence identical to that of an mRNA strongly suppresses the expression of the mRNA. Thus, such a double-stranded RNA comprising a nucleotide sequence identical to that of the mRNA of a marker gene can be used to suppress the expression of the marker gene. A double-stranded RNA comprising a nucleotide sequence having at least 20 or more consecutive nucleotides is preferably used to exert an RNAi effect. The double strand may be composed of separate strands or a stem-and-loop structure of a single RNA chain.

[0354] With respect to an antisense nucleic acid, a ribozyme, or a polynucleotide exerting the RNAi effect, a complementary nucleotide sequence and an identical nucleotide sequence are not limited to a perfectly complementary nucleotide sequence and a perfectly identical nucleotide sequence, respectively. When having a high sequence complementarity or identity, the RNAs exhibit the activity of suppressing expression. When having typically 70% or higher, preferably 80% or higher, more preferably, 90% or higher, still more preferably 95% or higher, for example, 98% or higher identity to a nucleotide sequence or a nucleotide sequence complementary to a nucleotide sequence, an RNA can be deemed to have a high identity or complementarity.

[0355] Although the dosage may vary depending on the age, sex, body weight, and symptoms of a patient, and also treatment effects, method for administration, treatment duration, type of active ingredient contained in the drug composition, or such, it can be usually administered in the range of 0.1 mg to 500 mg, preferably 0.5 mg to 20 mg per dose for an adult. However, since the dosage varies according to various conditions, an amount less than the above-described dosage may be sufficient in some cases, whereas in others, a dosage exceeding the above-described range may be required.

[0356] The present invention also provides a DNA chip for diagnosing bronchial asthma or chronic obstructive pulmonary disease, on which a probe has been immobilized. The probe is used to detect a marker gene that is at least a single gene selected from group (a) or group (b). There is no limitation on the type of the marker gene. The more the marker gene number, the more are the markers that can be used for the diagnosis. In general, the accuracy of diagnosis is high if more markers are used. When multiple marker genes are detected, it is advantageous to select genes having different properties. Genes that are assumed to be different with respect to the mechanism of expression level variation or and the function of the encoded proteins may be defined as “genes having different properties”.

[0357] Exemplary combinations of marker genes are shown below. These combinations can enhance the accuracy of allergy testing.

[Two or More Genes Selected from the Group Consisting of Marker Genes for proteases and protease Inhibitors]

[0358] Proteases and protease inhibitors can serve as markers for the balance between tissue disruption and construction. Specifically, a chip for testing allergic bronchial asthma or chronic obstructive pulmonary disease can be prepared by accumulating probes for detecting genes selected from genes belonging to the protease group and protease inhibitor group among the marker genes of the present invention. Marker genes belonging to each group are listed at the end of this specification.

[Two or More Genes Selected from the Group Consisting of Marker Genes for cytokines, cytokine Receptors, chemokines, chemokine Receptors, CD antigens, antibodies, and antibody Receptors]

[0359] Any combination of the genes listed above contains a pair of substances that are mutually related as a ligand-and-receptor. An immune response may be viewed as a result of the interaction between these substances. Accordingly, the immunological state of respiratory epithelial tissues may be determined by using these marker genes in combination. A pair of molecules in a ligand-and-receptor relationship may be selected as marker genes. Alternatively, one of the molecules in the pair may be selected as a marker gene when only that molecule has been shown to be a marker gene of the present invention.

[Two or More Genes Selected from the Group Consisting of Marker Genes for cytokines, extracellular matrix proteins, cytoskeletal proteins, cell Adhesion molecules, and Transcription Factors]

[0360] Extracellular matrix proteins include collagen. Cytoskeletal proteins include keratin, small proline-rich protein and involucrin. Cell adhesion molecules include cadherin and desmocollin. Transcription factors include jun, fos, and myc. The degree of the differentiation of respiratory epithelial tissues or remodeling (repair) of inflammatory lesions can be assessed by monitoring the expression levels of marker genes.

[Two or More Genes Selected from Marker Genes Encoding Enzymes]

[0361] Once a gene is selected from marker genes encoding enzymes, then it is possible to know which metabolic processes occur in respiratory epithelial cells. For example, the metabolism of lipid mediators and lipid molecules participating in the barrier function of the respiratory epithelium can be determined based on the expression levels of lipid-metabolizing enzymes. Such lipid-metabolizing enzymes include, for example, phospholipase A2, cyclooxygenase-2, prostaglandin D2 synthase, and fatty acid desaturases 1 and 2.

[0362] Alternatively, a chip for testing for bronchial asthma or chronic obstructive pulmonary disease, which contains densely immobilized probes capable of detecting genes selected from those constituting groups (a) and (b), is effective in order to achieve a more accurate diagnosis. The selected genes are a combination of any multiple genes. Specifically, typically 10 or more, for example, 30 or more, preferably 50 or more, more preferably 60 or more, still more preferably 80 or more, or 100 or more genes can be selected from group (a). Likewise, typically 10 or more, for example, 30 or more, preferably 50 or more, more preferably 60 or more, still more preferably 80 or more, or 100 or more genes can be selected from group (b). Much more genes, for example, 150 or more, preferably 180 or more, more preferably 200 or more genes may be selected from each of the groups (a) and (b).

[0363] The present invention provides marker genes belonging to groups (a) and (b) described below for bronchial asthma or chronic obstructive pulmonary disease:
[0364] (a) group of genes whose expression levels are increased in respiratory epithelial cells upon stimulation with IL-13; and
[0365] (b) group of genes whose expression levels are decreased in respiratory epithelial cells upon stimulation with IL-13.

[0366] The use of the expression level of each gene as a marker makes it possible to establish a method of testing for bronchial asthma or chronic obstructive pulmonary disease; create animal models for bronchial asthma or chronic obstructive pulmonary disease; and screen for candidate compounds for therapeutic agents for treating the diseases. All marker genes of the present invention are genes whose expression levels vary upon stimulation with IL-13 in respiratory epithelial cells cultured by the AI method. The AI method enables the culture of respiratory epithelial cells under conditions similar to the original conditions in the body. Thus, there is a high possibility that the expression levels of marker genes found throughout the present invention are indeed altered upon stimulation with IL-13 in tissues of the respiratory tract. As described herein in Examples, the expression levels of the marker genes of the present invention are indeed increased in the mouse asthma model. Thus, all the marker genes of the present invention can be used as markers for bronchial asthma or chronic obstructive pulmonary disease, and as targets in treating bronchial asthma or chronic obstructive pulmonary disease.

[0367] The variation in the expression level of each marker gene of the present invention correlates to the disease state. Thus, bronchial asthma or chronic obstructive pulmonary disease can be treated by controlling the expression levels of the marker genes and the activities of the proteins encoded by the marker genes. For example, when the expression level of a gene of interest is increased in respiratory epithelial cells accompanied by the differentiation of the cells into goblet cells, the expression of the gene or the activity of the encoded protein is inhibited in a therapeutic strategy for treating bronchial asthma or chronic obstructive pulmonary disease. In contrast, when the expression level of a gene of interest is decreased in respiratory epithelial cells, the expression of the gene or the activity of the encoded protein is enhanced in a therapeutic strategy for treating bronchial asthma or chronic obstructive pulmonary disease. Furthermore, the marker genes can be used as novel clinical diagnostic markers to monitor bronchial asthma or chronic obstructive pulmonary disease in the treatment of the diseases.

[0368] The expression level of each marker gene provided by this invention can be easily determined, regardless of the type of allergen. Therefore, the overall pathology of an allergic reaction can be understood.

[0369] Additionally, the methods of testing for bronchial asthma or chronic obstructive pulmonary disease of this invention have low invasiveness towards patients since analysis of expression levels can be carried out using a biological sample. Furthermore, gene expression analysis has enabled highly sensitive measurements using small amounts of samples. Year after year in gene analysis technology, high throughput methods are being improved and costs are being decreased. Therefore, in the near future, the methods of testing for bronchial asthma or chronic obstructive pulmonary disease of this invention are expected to become important bedside diagnostic methods (methods that can be performed outside labs). In this sense, diagnostic value of the marker genes of this invention is high.

[0370] Furthermore, the present invention reveals that the expression level of pendrin in respiratory epithelial cells is increased upon IL-13 stimulation and that the PDS gene encoding pendrin is one of genes participating in the differentiation of respiratory epithelium cells into goblet cells. The expression level of pendrin is also increased in the lung of the asthma model mouse, and thus the present invention shows that the PDS gene encoding pendrin is closely associated with bronchial asthma or chronic obstructive pulmonary disease. The development of drugs for suppressing goblet cell differentiation did not start until recently. Thus, the present invention provides a new approach in drug discovery. In addition, the present invention reveals genes participating in goblet cell differentiation, enabling a more fundamental therapy that uses the genes. Furthermore, agents that control the expression level of genes participating in goblet cell differentiation or the activity of proteins participating in goblet cell differentiation can be used in the treatment of diseases characterized by inflammation and overproduction of mucus, such as chronic obstructive pulmonary disease, cystic fibrosis, chronic sinusitis, bronchiectasis, and diffuse panbronchiolitis, as well as asthma.

[0371] Any patents, published patent applications, and any prior art references cited herein are incorporated by reference. Hereinafter, the present invention is described more specifically based on Examples, but it is not to be construed as being limited thereto.

### EXAMPLE 1

### The Air Interface (AI) Method and the Immersed Feeding (IMM) Method

1. The Air Interface Method:

[0372] Approval for this study was obtained from the Ethical Committee of the Faculty of Medicine, The Tohoku University, Japan. Tracheal tissues derived from anatomical specimens were stretched on plates. The epithelia were removed and allowed to stand still in phosphate buffer containing protease (0.05%) at 4° C. overnight. The following day, a culture medium containing fetal calf serum was added to the samples to neutralize enzyme activity, and respiratory epithelial cells were isolated by shaking the samples.

[0373] After the cell count was determined, cells were plated at the cell density of 10⁶ cells/cm² on a filter membrane with 0.45-μm pores, being attached to the bottom of a Millicell-HA Culture Plate Insert (Millipore Corp.). At the time of plating, Vitrogen gel (Vitrogen from Celtrix Pharmaceuticals, Inc. was used after gelation) was placed on the filter membrane as a growth-supporting material, and the epithelial cells were placed thereon. The Millicell inserts were placed in a 24-well plate (Falcon) containing a culture medium, which was a 1:1 mixture of Dulbecco's MEM and Ham F12 containing 2% Ultroser G and the antibiotics, penicillin, streptomycin, gentamycin, and amphotericin B. The cells were incubated overnight. Then, cells that had not adhered to the collagen gel were removed, and the remaining cells were cultured while the cell side was in contact with air (air interface) for approximately two weeks (See FIG. 1). The basic procedures of the AI method by which respiratory epithelial cells were cultured were the same as those described in the following reports:

Yamaya M; Kokyu, Vol. 12, No. 10, pp. 1238-1243 (1993); and Yamaya et al., Am. J. Physiol. 262 (Lung Cell Mol. Physiol. 6): L713-L724, 1992.

2. The Immersed Feeding Method (IMM Method):

[0374] As basically done in the AI method, Vitrogen gel was placed on a filter membrane, and epithelial cells were placed thereon. The IMM method is different from the AI method in the point that the IMM method comprises adding a medium to cover the epithelial cells. Then, the filter membrane was placed in a 24-well plate (Falcon) containing the same medium as that used in the AI method. The cells were incubated for approximately two weeks (See FIG. 2). The basic procedures of the IMM method by which respiratory epithelial cells were cultured were the same as those described in the following reports:

Yamaya M; Kokyu, Vol. 12, No. 10, pp. 1238-1243 (1993); and Yamaya et al., Am. J. Physiol. 262 (Lung Cell Mol. Physiol. 6): L713-L724, 1992.

### EXAMPLE 2

### Stimulation of bronchial epithelial cells with IL-13

[0375] In the AI method in Example 1, human IL-13 (Peprotech, Inc.) was added to the medium at the concentration of 50 ng/mL when changing the medium, every day for 7 days. After 7 days, human IL-13 was added to the medium when the medium was changed, every two days. After 14 days of incubation, cells were treated by PAS staining for acidic sugar chains and Alcian blue staining for basic sugar chains. The result showed that the cells had differentiated into goblet cells comprising a huge glycoprotein, mucin.

[0376] Human IL-13 was also added in the IMM method. However, goblet cell differentiation was not observed. The objective of this study is to screen genes associated with the differentiation of respiratory epithelial cells into goblet cells upon IL-13 stimulation by the AI method. Therefore, instead of completely differentiated day-14 cells, cells that were in the process of undergoing cell differentiation were harvested at day 3 and day 7. Furthermore, cells from two different lots were used in the culture. The culture conditions used are described below.

TABLE 1

| | | | |
|---|---|---|---|
| | Stimulation | | |
| Culture method | with IL-13 | Day 3 | Day 7 |

Lot 1

| | | | |
|---|---|---|---|
| AI | + | 1 | 5 |
| IMM | + | 2 | 6 |
| AI | − | 3 | 7 |
| IMM | − | 4 | 8 |

Lot 2

| | | | |
|---|---|---|---|
| AI | + | 9 | 11 |
| AI | − | 10 | 12 |

### EXAMPLE 3

### Preparation of RNA for GeneChips

[0377] Respiratory epithelial cells treated by the procedure described above were lysed with ISOGEN (Nippon Gene Co., Ltd.). RNA was isolated from the solution according to the protocol attached to ISOGEN. Chloroform was added to the solution. After the mixture was stirred and centrifuged, the aqueous layer was collected. Then, isopropanol was added to the aqueous solution. After stirring and centrifuging the solution, the precipitated total RNA was collected. Approximately 5 μg to 15 μg total RNAs were extracted from sample Nos. 1 to 12. The total RNAs were analyzed for gene expression using 15 HG-U95A to HG-U95E from Affymetrix. The type A gene chip comprises about 12,000 probes designed based on the information on the nucleotide sequences of full-length cDNAs. Each of the type B, C, D, and E gene chips comprises about 50,000 probes designed based on the information on the nucleotide sequences of ESTs.

### EXAMPLE 4

### Synthesis of cRNA for GeneChips

[0378] Single stranded cDNA was prepared from 5 μg of total RNA by reverse transcription using Superscript II Reverse Transcriptase (Life Technologies) following the method of Expression Analysis Technical Manual by Affymetrix, and by using T7-(dT)₂₄ (Amersham Pharmacia) as a primer. The T7-(dT)₂₄ primer comprises a nucleotide sequence in which d (T)₂₄ is added to a T7 promoter nucleotide sequence, as shown below.

T7-(dT)₂₄ primer (SEQ ID NO: 1)
5′-
GGCCAGTGAATTGTAATACGACTCACTATAGGGAGGCGG-(dT)₂₄-3′

[0379] Next, according to Expression Analysis Technical Manual, DNA ligase, DNA polymerase I, and RNase H were added to synthesize double stranded cDNA. After phenol-chloroform extraction of cDNA, the extract was passed through Phase Lock Gels, and was purified by ethanol precipitation.

[0380] Furthermore, using BioArray High Yield RNA Transcription Labeling Kit, biotin-labeled cRNA was synthesized. Approximately 20-50 μg of biotinated cRNA was synthesized from Sample Nos. 1 to 12. Using RNeasy Spin column (QIAGEN), cRNA was purified and then fragmented by heat treatment.

[0381] 15 μg of this cRNA was added to a hybridization cocktail, according to the Expression Analysis Technical Manual. This was placed in an array and was hybridized for 16 hours at 45° C.

[0382] After the array was washed, streptavidin phycoerythrin was added for staining. After washing, a mixed antibody solution of normal goat IgG and biotinylated goat IgG was added to the array. Furthermore, in order to enhance fluorescence intensity, streptavidin phycoerythrin was added again for staining. After washing, this was set in a scanner and was analyzed by the GeneChip software Suite 4.0.

### EXAMPLE 5

### GeneChip Analysis

[0383] Data analysis was performed using the GeneChip analysis software Suite 4.0. Average Intensity (1) and Background Average (2) were determined by Absolute Analysis, and four average values were obtained (AI method, no stimulation; AI method, IL-13 stimulation; IMM method, no stimulation; and IMM method, IL-13 stimulation) by subtracting (2) from (1). These four values were used as scale factors for comparison analysis.

[0384] First, absolute analysis was performed to analyze one chip data. Positives and negatives were determined by comparing the fluorescence intensity of perfect matches and mismatches of a probe set. Determination of the three categories of Absolute Calls, i.e., P (present), A (absent), and M (marginal), were made by values of Pos Fraction, Log Avg, and Pos/Neg:

[0385] Pos Fraction; ratio of positive pairs.

[0386] Log Avg; average of the log of fluorescence intensity ratio between probe cells of perfect match and mismatch.

[0387] Pos/Neg; ratio of the number of positive pairs and negative pairs.

[0388] Additionally, Average Difference (Avg Diff), which is the average value of the difference in fluorescence intensities between perfect matching and mismatching probe cells, was calculated for each gene.

[0389] Next, Comparison Analysis was performed on two sets of data. For example, comparison was made between the AI method, no stimulation of day 3 and the AI method, IL-13 stimulation of day 3, and the difference in expression levels was ranked as follows. Determination of the 5 categories of difference calls, which are I, D, MI, MD, and NC, were made from values of Inc/Dec, Inc Ratio, Dpos-Dneg Ratio, and Log Avg Ratio Change.
[0390] Inc: Number of probe pairs that corresponded to IL-13 stimulation and no stimulation and that were judged to have increased expression levels when stimulated by IL-13.
[0391] Dec: Number of pairs judged to have decreased expression levels when stimulated by IL-13.
[0392] Inc/Dec: Ratio of the number of pairs judged to be Inc and number of pairs judged to be Dec.
[0393] Inc Ratio: Number of pairs judged to be Inc/number of pairs actually used.
[0394] Dpos/Dneg Ratio: Ratio between the number of Neg Change subtracted from that of Pos Change, and the number of pairs actually used.
[0395] Pos Change: Difference between the number of positive pairs in Absolute Analysis of IL-13 stimulation, and the number of positive pairs in Absolute Analysis of no stimulation.
[0396] Neg Change: Difference between the number of negative pairs in Absolute Analysis of IL-13 stimulation, and the number of negative pairs in Absolute Analysis of no stimulation.
[0397] Log Avg Ratio Change: Difference between Log Avg in Absolute Analysis of IL-13 stimulation and no stimulation.
[0398] Increased: I,
[0399] Decreased: D,
[0400] Marginally Increased: MI,
[0401] Marginally Decreased: MD, and
[0402] No Change: NC
   1. A group of genes associated with goblet cell differentiation, which had been narrowed down from the genes on the gene chips of HG-U95A to HG-U95E (group (a)/a group of genes whose expression levels were increased; and group (b)/a group of genes whose expression levels were decreased)

[0403] The sequences and the number of genes in gene chips A to E, whose expression levels were found to increase by two folds or more or decrease by half or less upon IL-13 stimulation in both Lots 1 and 2 under the culture conditions of the AI method, are shown in each category in Table 2. The column labeled “Increased” contains the sequences and the numbers of genes whose expression levels increased upon IL-13 stimulation. The column labeled “Decreased” contains the sequences and the numbers of genes whose expression levels decreased upon IL-13 stimulation. The annotations on the genes selected using EST chips of B to E are described according to the database NetAffx (TM) of the June/2002 version provided by Affymetrix.

TABLE 2

| | | A chip | | | | B chip | | | | C chip | | | |
|---|---|---|---|---|---|---|---|---|---|---|---|---|---|
| | | increased | | decreased | | increased | | decreased | | increased | | decreased | |
| | | # of | # of | # of | # of | # of | # of | # of | # of | # of | # of | # of | # of |
| | category | probe | gene | probe | gene | probe | gene | probe | gene | probe | gene | probe | gene |
| 1 | apoptosis | 0 | 0 | 1 | 1 | 0 | 0 | 0 | 0 | 0 | 0 | 0 | 0 |
| 2 | cell adhesion | 6 | 6 | 6 | 6 | 2 | 2 | 2 | 2 | 0 | 0 | 0 | 0 |
| 3 | cell cycles | 2 | 1 | 0 | 0 | 0 | 0 | 0 | 0 | 1 | 1 | 1 | 1 |
| 4 | chemokine | 2 | 2 | 1 | 1 | 1 | 1 | 0 | 0 | 0 | 0 | 1 | 1 |
| 5 | cytokine related | 2 | 2 | 2 | 2 | 1 | 1 | 1 | 1 | 1 | 1 | 0 | 0 |
| 6 | cytosolic protein | 2 | 2 | 2 | 2 | 1 | 1 | 0 | 0 | 0 | 0 | 0 | 0 |
| 7 | enzyme | 20 | 22 | 19 | 19 | 7 | 8 | 3 | 3 | 1 | 1 | 0 | 0 |
| 8 | hypothetical protein | 7 | 7 | 4 | 4 | 26 | 25 | 26 | 25 | 8 | 8 | 15 | 14 |
| 9 | interferon-inducible protein | 14 | 15 | 0 | 0 | 2 | 2 | 0 | 0 | 1 | 1 | 0 | 0 |
| 10 | kinase | 7 | 7 | 4 | 4 | 5 | 5 | 1 | 1 | 0 | 0 | 1 | 1 |
| 11 | matrix protein | 0 | 0 | 2 | 3 | 0 | 0 | 1 | 1 | 0 | 0 | 0 | 0 |
| 12 | membrane protein | 11 | 9 | 12 | 14 | 3 | 3 | 1 | 1 | 3 | 2 | 1 | 1 |
| 13 | metabolism | 4 | 3 | 6 | 6 | 0 | 0 | 0 | 0 | 0 | 0 | 0 | 0 |
| 14 | MHC | 4 | 3 | 2 | 1 | 1 | 1 | 0 | 0 | 1 | 1 | 0 | 0 |
| 15 | MMP related | 4 | 7 | 2 | 2 | 0 | 0 | 0 | 0 | 0 | 0 | 0 | 0 |
| 16 | oncogenesis | 1 | 1 | 6 | 5 | 2 | 2 | 1 | 1 | 1 | 1 | 0 | 0 |
| 17 | others | 7 | 7 | 7 | 7 | 8 | 8 | 7 | 6 | 5 | 4 | 3 | 3 |
| 18 | P450 | 0 | 0 | 3 | 2 | 1 | 1 | 0 | 0 | 0 | 0 | 0 | 0 |
| 19 | phosphatase | 2 | 2 | 2 | 2 | 0 | 0 | 0 | 0 | 0 | 0 | 0 | 0 |
| 20 | protein binding protein | 1 | 1 | 4 | 4 | 2 | 2 | 2 | 2 | 0 | 0 | 0 | 0 |
| 21 | proteinase | 4 | 4 | 1 | 1 | 1 | 1 | 0 | 0 | 2 | 2 | 0 | 0 |
| 22 | proteinase inhibitor | 5 | 4 | 5 | 4 | 0 | 0 | 0 | 0 | 0 | 0 | 0 | 0 |
| 23 | S100 | 0 | 0 | 1 | 1 | 0 | 0 | 0 | 0 | 0 | 0 | 0 | 0 |
| 24 | signal transduction | 6 | 6 | 9 | 8 | 3 | 3 | 0 | 0 | 1 | 1 | 0 | 0 |
| 25 | structural protein | 2 | 2 | 9 | 7 | 1 | 1 | 1 | 1 | 2 | 2 | 1 | 1 |
| 26 | transcription factor | 9 | 9 | 6 | 6 | 2 | 5 | 1 | 1 | 0 | 0 | 2 | 2 |
| 27 | transporter | 2 | 2 | 7 | 7 | 0 | 0 | 5 | 5 | 0 | 0 | 0 | 0 |
| | uncategorized | 0 | 0 | 3 | 3 | 11 | 11 | 13 | 13 | 6 | 6 | 2 | 2 |
| | subtotal | 124 | 124 | 126 | 122 | 80 | 83 | 65 | 63 | 33 | 31 | 27 | 26 |

| D chip | | E chip | |
|---|---|---|---|
| increased | decreased | increased | decreased |

| | | # of | # of | # of | # of | # of | # of | # of | # of |
|---|---|---|---|---|---|---|---|---|---|
| | category | probe | gene | probe | gene | probe | gene | probe | gene |
| 1 | apoptosis | 0 | 0 | 0 | 0 | 0 | 0 | 1 | 1 |
| 2 | cell adhesion | 0 | 0 | 1 | 1 | 1 | 1 | 1 | 1 |
| 3 | cell cycles | 0 | 0 | 0 | 0 | 0 | 0 | 0 | 0 |
| 4 | chemokine | 0 | 0 | 0 | 0 | 1 | 1 | 0 | 0 |
| 5 | cytokine related | 0 | 0 | 2 | 2 | 0 | 0 | 0 | 0 |
| 6 | cytosolic protein | 0 | 0 | 0 | 0 | 0 | 0 | 0 | 0 |
| 7 | enzyme | 3 | 5 | 1 | 1 | 4 | 5 | 2 | 2 |
| 8 | hypothetical protein | 4 | 4 | 0 | 0 | 12 | 12 | 4 | 3 |
| 9 | interferon-inducible protein | 0 | 0 | 0 | 0 | 1 | 1 | 0 | 0 |
| 10 | kinase | 0 | 0 | 0 | 0 | 0 | 0 | 0 | 0 |
| 11 | matrix protein | 0 | 0 | 0 | 0 | 0 | 0 | 0 | 0 |
| 12 | membrane protein | 0 | 0 | 0 | 0 | 2 | 2 | 0 | 0 |
| 13 | metabolism | 0 | 0 | 0 | 0 | 0 | 0 | 0 | 0 |
| 14 | MHC | 0 | 0 | 0 | 0 | 0 | 0 | 0 | 0 |
| 15 | MMP related | 0 | 0 | 0 | 0 | 0 | 0 | 0 | 0 |
| 16 | oncogenesis | 0 | 0 | 0 | 0 | 3 | 2 | 0 | 0 |
| 17 | others | 0 | 0 | 1 | 1 | 4 | 3 | 0 | 0 |
| 18 | P450 | 0 | 0 | 0 | 0 | 0 | 0 | 0 | 0 |
| 19 | phosphatase | 0 | 0 | 0 | 0 | 0 | 0 | 0 | 0 |
| 20 | protein binding protein | 0 | 0 | 0 | 0 | 1 | 1 | 0 | 0 |
| 21 | proteinase | 0 | 0 | 0 | 0 | 0 | 0 | 0 | 0 |
| 22 | proteinase inhibitor | 0 | 0 | 1 | 1 | 0 | 0 | 0 | 0 |
| 23 | S100 | 0 | 0 | 0 | 0 | 0 | 0 | 0 | 0 |
| 24 | signal transduction | 1 | 1 | 0 | 0 | 1 | 1 | 0 | 0 |
| 25 | structural protein | 0 | 0 | 0 | 0 | 0 | 0 | 0 | 0 |
| 26 | transcription factor | 0 | 0 | 0 | 0 | 0 | 0 | 0 | 0 |
| 27 | transporter | 0 | 0 | 0 | 0 | 3 | 3 | 1 | 1 |
| | uncategorized | 5 | 5 | 9 | 9 | 1 | 1 | 2 | 2 |
| | subtotal | 13 | 15 | 15 | 15 | 34 | 33 | 11 | 10 |

[0404] Tables 3 to 19 (a group of genes whose expression levels increased upon IL-13 stimulation) and Tables 20 to 36 (a group of genes whose expression levels decreased upon IL-13 stimulation) include lists of categorized genes on the chips of HG-U95A to HG-U95E. The Tables also include values of fold changes upon IL-13 stimulation in lot 1 and 2 when the AI method or the IMM method was used.

TABLE 3

| | | | | | | | | | | lot 1 | |
|---|---|---|---|---|---|---|---|---|---|---|---|
| | Cat_{—} | | | | | | | | | Day 3 | |
| | tag | category | Probe ID | Chip | accession | RefSeq | RefSeq | gene symbol | map location | AI | IMM |
| 1 | 2 | cell adhesion | 115_at | HG-U95A | X14787 | NM_003246 | NP_003237 | THBS1 | 15q15 | 10.4 | |
| 2 | 2 | cell adhesion | 1451_s_at | HG-U95A | D13666 | NM_006475 | NP_006466 | OSF-2 | 13q13.2 | 10.5 | 8.8 |
| 3 | 2 | cell adhesion | 1620_at | HG-U95A | D31784 | NM_004932 | NP_004923 | CDH6 | 5p15.1-p14 | 4.3 | 4.2 |
| 4 | 2 | cell adhesion | 32640_at | HG-U95A | M24283 | NM_000201 | NP_000192 | ICAMt | 19p13.3- | 6.5 | |
| | | | | | | | | | p13.2 | | |
| 5 | 2 | cell adhesion | 35803_at | HG-U95A | S82240 | NM_005168 | NP_005159 | ARHE | 2q23.3 | | |
| 6 | 2 | cell adhesion | 39119_s_at | HG-U95A | AA631972 | NM_004221 | NP_004212 | NK4 | 16p13.3 | 4 | 2 |
| 7 | 3 | cell cycles | 1794_at | HG-U95A | M92237 | NM_001760 | NP_001751 | CCND3 | 6p21 | 2.2 | |
| 7 | 3 | cell cycles | 1795_g_at | HG-U95A | M92287 | NM_001760 | NP_001751 | CCND3 | 6p21 | 2.2 | |
| 8 | 4 | chemokine | 35061_at | HG-U95A | AF030514 | NM_005409 | NP_005400 | SCYB11 | 4q21.2 | 8.9 | 7.9 |
| 9 | 4 | chemokine | 431_at | HG-U95A | X02530 | NM_001565 | NP_001556 | SCYB10 | 4q21 | 5.2 | 3.9 |
| 10 | 5 | cytokine related | 1016_s_at | HG-U95A | U70981 | NM_000640 | NP_000631 | IL13RA2 | Xq13.1-q28 | 10.2 | 5.1 |
| 11 | 5 | cytokine related | 1262_s_at | HG-U95A | M19154 | NM_003238 | NP_003229 | TGFB2 | 1q41 | | 2 |
| 12 | 6 | cytosolic protein | 276_at | HG-U95A | L08069 | NM_001539 | NP_001530 | DNAJA1 | 9p13-p12 | 2 | |
| 13 | 6 | cytosolic protein | 39154_at | HG-U95A | AI952982 | NM_006705 | NP_006696 | GADD45G | 9q22.1-q22.2 | 3.1 | |

| | lot 1 | | lot 2 | | | | | |
|---|---|---|---|---|---|---|---|---|
| | Day 7 | | Day 3 | Day 7 | | | SEQ ID NO: | SEQ ID NO: |
| | AI | IMM | AI | AI | title | reference | (nucleotide seq.) | (amino acid seq.) |
| 1 | | | 4.1 | | thrombospondin 1 | Proc. Natl. Acad. Sci. | 25 | 548 |
| | | | | | | U.S.A. 83: 5449-5453 (1986) | | |
| 2 | 25.4 | 30.6 | 86.8 | 46.4 | osteoblast specific factor | Unpublished:- (1992) | 26 | 549 |
| | | | | | 2 (fasciclin I-like) | | | |
| 3 | | 4.2 | 5.6 | 12.1 | cadherin 6, type 2 | Cell Regul. 2: 261- | 27 | 550 |
| | | | | | preproprotein | 270 (1991) | | |
| 4 | 3.1 | | 2.8 | 4.1 | intercellular adhesion | Cell 52 (6). 925-933 | 28 | 551 |
| | | | | | molecule 1 precursor | (1988) | | |
| 5 | 2.3 | | | 2 | ras homolog gene family, | Mol. Cell. Bid. 16: 2689- | 29 | 552 |
| | | | | | member E | 2699 (1996) | | |
| 6 | 6 | 2.5 | 4.1 | | natural killer cell | J. Immunol. 148: 597- | 30 | 553 |
| | | | | | transcript 4 | 603(1992) | | |
| 7 | | 2.3 | 2.3 | | cyclin D3 | Genomics 13: 575-584 | 31 | 554 |
| 7 | 2.1 | | 2.4 | | cyclin D3 | Genomics 13: 575-584 | 31 | 554 |
| 8 | | | 6.8 | | small inducible cytokine | J. Biol. Chem. 271: 22878- | 32 | 555 |
| | | | | | subfamily B (Cys-X-Cys). | 22884 (1996) | | |
| | | | | | member 11 precursor (I- | | | |
| | | | | | TAC. IP-9) | | | |
| 9 | | | 4.9 | | small inducible cytokine | Nature 315: 672-676 (1985) | 33 | 556 |
| | | | | | subfamily B (Cys-X-Cys). | | | |
| | | | | | member 10 (IP-10) | | | |
| 10 | 4.8 | 5.3 | 15.9 | 36.5 | interleukin 13 receptor, | J. Biol. Chem. 271: 16921- | 34 | 557 |
| | | | | | alpha 2 | 16926 (1996) | | |
| 11 | 3.2 | | 4.1 | 5.9 | transforming growth | EMBO J. 6: 3673- | 35 | 558 |
| | | | | | factor, beta 2 | 3677 (1987) | | |
| 12 | 2.5 | | 2.2 | | DnaJ (Hsp40) homolog. | Biochim. Biophys. Acta. | 36 | 559 |
| | | | | | subfamily A, member 1 | 1174: 114-116 (1993) | | |
| 13 | 4.3 | 3.1 | 5.3 | | growth arrest and DNA- | Proc. Natl. Acad. Sci. | 37 | 560 |
| | | | | | damage-inducible. gamma | U.S.A. 90: 2719-2723 (1993) | | |

[0405] TABLE 4

| | | | | | | | | | | lot 1 | |
|---|---|---|---|---|---|---|---|---|---|---|---|
| | Cat_{—} | | | | | | | | | Day 3 | |
| | tag | category | Probe ID | Chip | accession | RefSeq | RefSeq | gene symbol | map location | AI | IMM |
| 14 | 7 | enzyme | 1948_f_at | HG-U95A | U31511 | NM_000625 | NP_000616 | NOS2A | 17q11.2-q12 | 5.3 | 4.3 |
| 15 | 7 | enzyme | 32571_at | HG-U95A | X68836 | NM_005911 | NP_005902 | MAT2A | 2p11.2 | | |
| 16 | 7 | enzyme | 32775_r_at | HG-U95A | AB006746 | NM_021105 | NP_066928 | PLSCR1 | 3q23 | 2.9 | 2.6 |
| 17 | 7 | enzyme | 34795_at | HG-U95A | U84573 | NM_000935 | NP_000926 | PLOD2 | 3q23-q24 | 2.3 | |
| 18 | 7 | enzyme | 34823_at | HG-U95A | X60708 | NM_001935 | NP_001926 | DPP4 | 2q24.3 | | |
| 19 | 7 | enzyme | 36495_at | HG-U95A | U21931 | NM_000507 | NP_000498 | FBP1 | 9q22.2-q22.3 | 3.2 | |
| 20 | 7 | enzyme | 37483_at | HG-U95A | AB018287 | NM_014707, | NP_055522, | HDAC9 | 7p21-p15 | 4.1 | 3.1 |
| | | | | | | NM_058176, | NP_478056, | | | | |
| | | | | | | NM_058177 | NP_478057 | | | | |
| 21 | 7 | enzyme | 38121_at | HG-U95A | X59892 | NM_004184 | NP_004175 | WARS | 14q32.31 | 3.5 | 2.9 |
| 22 | 7 | enzyme | 38178_at | HG-U95A | L40802 | NM_002153 | NP_002144 | HSD17B2 | 6q24.1- | | |
| | | | | | | | | | q24.2 | | |
| 23 | 7 | enzyme | 38220_at | HG-U95A | U20938 | NM_000110 | NP_000101 | DPYD | 1p22 | 2.7 | 7.5 |
| 24 | 7 | enzyme | 38287_at | HG-U95A | AA808961 | NM_002800 | NP_002791 | PSMB9 | 6p21.3 | 3.2 | 2.3 |
| 25 | 7 | enzyme | 38388_at | HG-U95A | M11810 | NM_002534, | NP_002525, | OAS1 | 12q24.1 | 6.2 | 5.5 |
| | | | | | | NM_016816 | NP_058132 | | | | |
| 25 | 7 | enzyme | 38389_at | HG-U95A | X04371 | NM_002534, | NP_002525, | OAS1 | 12q24.1 | 4.5 | 5.3 |
| | | | | | | NM_016816 | NP_058132 | | | | |
| 26 | 7 | enzyme | 38404_at | HG-U95A | M55153 | NM_004613 | NP_004604 | TGM2 | 20q12 | 8.5 | 5 |
| 27 | 7 | enzyme | 39263_at | HG-U95A | M87434 | NM_002535 | NP_002526 | OAS2 | 12q24.2 | 5 | 2.9 |
| 28 | 7 | enzyme | 39425_at | HG-U95A | X91247 | NM_003330 | NP_003321 | TXNRD1 | 12q23-q24.1 | 2 | |
| 29 | 7 | enzyme | 40505_at | HG-U95A | AA883502 | NM_004223 | NP_004214 | UBE2L6 | 11q12 | 3.3 | 4.2 |
| 30 | 7 | enzyme | 41352_at | HG-U95A | X62822 | NM_003032 | NP_003023 | SIAT1 | 3q27-q28 | 4.7 | 13.1 |
| 31 | 7 | enzyme | 41556_s_at | HG-U95A | AF019386 | NM_005114 | NP_005105 | HS3ST1 | 4p16 | 3.4 | 2.2 |
| 32 | 7 | enzyme | 908_at | HG-U95A | M14660 | NM_032664 | NP_116053 | FUT10 | 8p12 | 5.8 | 4 |

| | lot 1 | | lot 2 | | | | | |
|---|---|---|---|---|---|---|---|---|
| | Day 7 | | Day 3 | Day 7 | | | SEQ ID NO: | SEQ ID NO: |
| | AI | IMM | AI | AI | title | reference | (nucleotide seq.) | (amino acid seq.) |
| 14 | 9.4 | 2.8 | 14.5 | | nitric oxide synthase 2A | Proc. Natl. Acad. Sci. | 38 | 561 |
| | | | | | (inducible, hepatocytes) | U.S.A. 90: 3491-3495 (1993) | | |
| 15 | 2.5 | 2.4 | | 2.9 | methionine | Unpublished:- (2001) | 39 | 562 |
| | | | | | adenosyltransferase IL | | | |
| | | | | | alpha | | | |
| 16 | | | 3 | | phospholipid scramblase 1 | J. Biol. Chem. 272 (29), | 40 | 563 |
| | | | | | | 8240-18244 (1997) | | |
| 17 | | | 2 | | procollagen-lysine, 2- | J. Biol. Chem. 272. 6831- | 41 | 564 |
| | | | | | oxoglutarate 5- | 6834 (1997) | | |
| | | | | | dioxygenase (lysine | | | |
| | | | | | hydroxylase) 2 | | | |
| 18 | 3.2 | 3.9 | 7.6 | 10 | dipeptidylpeptidase IV | J. Biol. Chem. 267: 4824- | 42 | 565 |
| | | | | | (CD26, adenosine | 4833(1992) | | |
| | | | | | deaminase complexing | | | |
| | | | | | protein 2) | | | |
| 19 | | | 4.4 | | fructose-1,6- | Proc. Natl. Acad. Sci. | 43 | 566 |
| | | | | | biphosphatase (FBP1) | U.S.A. 85: 6904-6908 (1988) | | |
| | | | | | gene, exon 7 | | | |
| 20 | | | 3.7 | 26.1 | histone deacetylase 7B | EMBO J 18: 5085- | 44, 45, 46 | 567, 568, 569 |
| | | | | | isoform; HDRP, HDAC9, | 5098(1999) | | |
| | | | | | HDAC9a | | | |
| 21 | | 6 | 8.7 | | tryptophanyl-tRNA | Proc. Natl. Acad. Sci. | 47 | 570 |
| | | | | | synthetase | U.S.A. 88: 11520-11524 | | |
| | | | | | | (1991) | | |
| 22 | 3.1 | | | 3.5 | 17-beta-hydroxysteroid | J. Biol. Chem. 268: 12964- | 48 | 571 |
| | | | | | dehydrogenase (17b-HSD) | 12969 (1993) | | |
| | | | | | gene | | | |
| 23 | 2.5 | 6.9 | 3.9 | 2.1 | dihydropyrimidine | J. Clin. Invest 81: 47- | 49 | 572 |
| | | | | | dehydrogenase | 51(1988) | | |
| 24 | 2.6 | 3.1 | 2.7 | 2.4 | proteasome (prosome, | Unpublished:- (2001) | 50 | 573 |
| | | | | | macropain) subunit beta | | | |
| | | | | | type, 9 (large | | | |
| | | | | | multifunctional protein) | | | |
| 25 | | 3.3 | 6.5 | | 2′-5′ oligoadenylate | Proc. Natl. Acad. | 51, 52 | 574, 575 |
| | | | | | synthetase gene, isoform | Sci. U.S.A. 80: 4904- | | |
| | | | | | E16, E18 | 4908(1983) | | |
| 26 | 2.4 | 3.3 | 4.7 | | | | 51, 52 | 574, 575 |
| 27 | 2.8 | | 2.1 | 6 | transglutaminase 2 (C | J. Biol. Chem. 266: 478-483 | 53 | 576 |
| | | | | | polypeptide, protein- | (1991) | | |
| | | | | | glutamine-gamma- | | | |
| | | | | | glutamyltransferase) | | | |
| 28 | | | 3.5 | | 2′-5′ oligoadenylate | J Biol Chem 1992 May | 54 | 577 |
| | | | | | synthetase 2, isoform p69 | 15; 267 (14): 9933-9 | | |
| 29 | 2.5 | | | 3.3 | thioredoxin reductase 1 | FEBS Lett. 373: 5-9 (1995) | 55 | 578 |
| 30 | 5.1 | | 2.1 | | ubiquitin-conjugating | J. Biol. Chem. 272: 13548- | 56 | 579 |
| | | | | | enzyme E2L 6 | 13554 (1997) | | |
| 31 | 8.7 | 21.6 | 3.9 | 2.4 | sialyltransferase 1 (beta- | Nucleic Acids Res 18: 667 | 57 | 580 |
| | | | | | gatactoside alpha-2,6- | (1990) | | |
| | | | | | sialytransferase) | | | |
| 32 | 3.8 | 3.7 | 5.8 | 2.5 | heparan sulfate D- | J. Biol. Chem. 270: 11267- | 58 | 581 |
| | | | | | glucosaminyl 3-O- | 11275 (1995) | | |
| | | | | | sulfotransferase 1 | | | |
| | | | | | precursor | | | |
| | | | 8.9 | | putative alpha 1,3-fucosyl | Unpublished:- (2002) | 59 | 582 |
| | | | | | transferase | | | |

[0406] TABLE 5

| | | | | | | | | | | lot 1 | |
|---|---|---|---|---|---|---|---|---|---|---|---|
| | Cat_{—} | | | | | | | | | Day 3 | |
| | tag | category | Probe ID | Chip | accession | RefSeq | RefSeq | gene symbol | map location | AI | IMM |
| 33 | 8 | hypothetical | 33787_at | HG-U95A | AB011109 | NM_014840 | NP_055655 | KIAA0537 | 12q24.11 | 7.5 | 5.8 |
| | | protein | | | | | | | | | |
| 34 | 8 | hypothetical | 34714_at | HG-U95A | AL050267 | NM_015474 | NP_056289 | SAMHD1 | 20pter-q12 | 3.4 | |
| | | protein | | | | | | | | | |
| 35 | 8 | hypothetical | 36070_at | HG-U95A | AL049389 | | | KIAA1199 | 15q | | |
| | | protein | | | | | | | | | |
| 36 | 8 | hypothetical | 36927_at | HG-U95A | AB000115 | NM_006820 | NP_006811 | GS3686 | 1p22.3 | 5.7 | |
| | | protein | | | | | | | | | |
| 37 | 8 | hypothetical | 37230_at | HG-U95A | AB007938 | NM_014851 | NP_055666 | KIAA0469 | 1p36.23 | | |
| | | protein | | | | | | | | | |
| 38 | 8 | hypothetical | 37784_at | HG-U95A | AL049227 | | | | | 6.4 | |
| | | protein | | | | | | | | | |
| 39 | 8 | hypothetical | 41402_at | HG-U95A | AL080121 | NM_015353 | NP_056208 | DKFZP564O0823 | 4q13.3-q21.3 | 5 | 6.7 |
| | | protein | | | | | | | | | |
| 40 | 9 | interferon- | 1107_s_at | HG-U95A | M13755 | NM_005101 | NP_005092 | ISG15 | 1p36.33 | 13.1 | 8.2 |
| | | inducible | | | | | | | | | |
| | | protein | | | | | | | | | |
| 40 | 9 | interferon- | 38432_at | HG-U95A | AA203213 | NM_005101 | NP_005092 | ISG15 | 1p36.33 | 23.7 | 27.9 |
| | | inducible | | | | | | | | | |
| | | protein | | | | | | | | | |
| 41 | 9 | interferon- | 32814_at | HG-U95A | M24594 | NM_001548 | NP_001539 | IFIT1 | 10q25-q26 | 10.6 | 7.6 |
| | | inducible | | | | | | | | | |
| | | protein | | | | | | | | | |
| 41 | 9 | interferon- | 915_at | HG-U95A | M24594 | NM_001548 | NP_001539 | IFIT1 | 10q25-q26 | 19.2 | 9.9 |
| | | inducible | | | | | | | | | |
| | | protein | | | | | | | | | |
| 42 | 9 | interferon- | 33304_at | HG-U95A | U88964 | NM_002201 | NP_002192 | ISG20 | 15q26 | 4.8 | 2.4 |
| | | inducible | | | | | | | | | |
| | | protein | | | | | | | | | |
| 43 | 9 | interferon- | 38549_at | HG-U95A | AF026941 | NM_080657 | NP_542388 | cig5 | 2p25.3 | 10.1 | |
| | | inducible | | | | | | | | | |
| | | protein | | | | | | | | | |
| 44 | 9 | interferon- | 38584_at | HG-U95A | AF026939 | NM_001549 | NP_001540 | IFIT4 | 10q24 | 2.7 | 10.4 |
| | | inducible | | | | | | | | | |
| | | protein | | | | | | | | | |
| 45 | 9 | interferon- | 40322_at | HG-U95A | D12763 | NM_003856, | NP_003847, | ILIRL1 | 2q12 | 5.5 | 2.6 |
| | | inducible | | | | NM_016232 | NP_157316 | | | | |
| | | protein | | | | | | | | | |
| 46 | 9 | interferon- | 425_at | HG-U95A | X67325 | NM_005532 | NP_005523 | IFI27 | 14q32 | 3.8 | 4.5 |
| | | inducible | | | | | | | | | |
| | | protein | | | | | | | | | |
| 47 | 9 | interferon- | 464_s_at | HG-U95A | U72882 | | AAB61703 | IFI35 | 17q21 | 13.2 | 9.6 |
| | | inducible | | | | | | | | | |
| | | protein | | | | | | | | | |
| 48 | 9 | interferon- | 675_at | HG-U95A | J04164 | NM_003641 | NP_003632 | IFITM1 | 11 | 10.7 | 19.9 |
| | | inducible | | | | | | | | | |
| | | protein | | | | | | | | | |
| 49 | 9 | interferon- | 1358_s_at | HG-U95A | U22970 | NM_002038, | NP_002029, | G1P3 | 1p35 | 7.1 | 7.1 |
| | | inducible | | | | NM_022872, | NP_075010, | | | | |
| | | protein | | | | NM_022873 | NP_075011 | | | | |
| 50 | 9 | interferon- | 37641_at | HG-U95A | O28915 | NM_006417 | NP_006408 | IFI44 | 1p31.1 | 5.9 | 8 |
| | | inducible | | | | | | | | | |
| | | protein | | | | | | | | | |
| 51 | 9 | interferon- | 39728_at | HG-U95A | J03909 | NM_006332 | NP_006323 | IFI30 | 19p13.1 | | |
| | | inducible | | | | | | | | | |
| | | protein | | | | | | | | | |

| | lot 1 | | lot 2 | | | | | |
|---|---|---|---|---|---|---|---|---|
| | Day 7 | | Day 3 | Day 7 | | | SEQ ID NO: | SEQ ID NO: |
| | AI | IMM | AI | AI | title | reference | (nucleotide seq.) | (amino acid seq.) |
| 33 | 8.8 | 3.3 | 4.8 | 4.8 | KIAA0537 gene product | DNA Res. 5 (1), 31-39 | 60 | 583 |
| | | | | | | (1998) | | |
| 34 | | | 3.7 | | DKFZP564A032 protein | Immunol. Lett. 74: 221-224 | 61 | 584 |
| | | | | | | (2000) | | |
| 35 | 4.3 | 2.3 | 2.7 | 3.4 | KIAA1199 | — | 62 | — |
| 36 | | | 6.4 | | hypothetical protein, | Unpublished:- (1996) | 63 | 585 |
| | | | | | expressed in osteoblast | | | |
| 37 | 2 | 2.4 | | 3 | KIAA0469 gene product | DNA Res. 4: 345- | 64 | 586 |
| | | | | | | 349(1997) | | |
| 38 | | 6 | 5 | 7.8 | DKFZp564N1116 | Unpublished:- (1999) | 65 | — |
| 39 | 3.9 | 9.6 | 5.4 | 4.6 | DKFZP56400823 protein | Unpublished:- ( ) | 66 | 587 |
| 40 | 3 | 3.8 | 8.8 | 4.3 | interferon-stimulated | J Biol Chem 1986 Jul | 67 | 588 |
| | | | | | protein, 15 kDa | 5; 261(19): 8811-6 | | |
| 40 | | 5 | 12.6 | 6.9 | interferon-stimulated | J Biol Chem 1986 Jul | 67 | 588 |
| | | | | | protein, 15 kDa | 5; 261(19): 8811-6 | | |
| 41 | | | 4 | | interferon-induced protein | Eur. J. Biochem. 155: 11-17 | 68 | 589 |
| | | | | | with tetratricopeptide | (1986) | | |
| | | | | | repeats 1 | | | |
| 41 | | 2.1 | 9 | 7.7 | interferon-induced protein | Eur. J. Biochem. 155: 11-17 | 68 | 589 |
| | | | | | with tetratricopeptide | (1986) | | |
| | | | | | repeats 1 | | | |
| 42 | | 4.2 | 3.3 | | interferon stimulated gene | Cytogenet. Cell | 69 | 590 |
| | | | | | (20 kD) | Genet. 79: 3-4 (1997) | | |
| 43 | | 2.2 | 14.3 | 7.4 | vipirin (cig5) mRNA | Unpublished:- (2001) | 70 | 591 |
| 44 | 4.6 | 3.4 | 10.3 | 3.6 | interferon-induced protein | Proc. Natl. Acad. Sci. | 71 | 592 |
| | | | | | with tetratricopeptide | U.S.A. 94: 7406-7411 (1997) | | |
| | | | | | repeats 4 | | | |
| 45 | | | 9.8 | | interleukin 1 receptor-like | Biochim. Biophys. Acta. | 72, 73 | 593, 594 |
| | | | | | 1 NM_016232 (analysis) | 1171: 215-218 (1992) | | |
| | | | | | interleukin 1 receptor-like | | | |
| | | | | | 1 | | | |
| 46 | 2.1 | 2.8 | 2.5 | 4.7 | interferon, alpha-inducible | Cancer Res 1993 Sep | 74 | 595 |
| | | | | | protein 27 | 1: 53 (17): 4096-101 | | |
| 47 | | 4.6 | 4.5 | | interferon, alpha-inducible | Biochem. Biophys. Res. | 75 | 596 |
| | | | | | protein 35 | Commun 229(1), 316-322 | | |
| | | | | | | (1996) | | |
| 48 | | 8.1 | 3.6 | | interferon induced | Eur. J. Biochem. 153: 367- | 76 | 597 |
| | | | | | transmembrane protein 1 | 371(1985) | | |
| | | | | | (9-27) | | | |
| 49 | 2.5 | | | 10.9 | interferon, alpha- | Cell 38: 745-755 (1984) | 77, 78, 79 | 598, 599, 600 |
| | | | | | inducible protein (clone | | | |
| | | | | | IFI-6-16)isoform a-c | | | |
| 50 | | 2.3 | 3.8 | | interferon-induced | Unpublished:- (2002) | 80 | 601 |
| | | | | | protein 44 | | | |
| 51 | 2.1 | | | 2.3 | interferon, gamma- | J Biol Chem 1988 Aug | 81 | 602 |
| | | | | | inducible protein 30 | 25: 263(24): 12036-43 | | |

[0407] TABLE 6

| | | | | | | | | | | lot 1 | |
|---|---|---|---|---|---|---|---|---|---|---|---|
| | Cat_{—} | | | | | | | | | Day 3 | |
| | tag | category | Probe ID | Chip | accession | RefSeq | RefSeq | gene symbol | map location | AI | IMM |
| 52 | 10 | kinase | 1560_g_at | HG-U95A | U24153 | NM_002577 | NP_002568 | PAK2 | 3 | | −2.1 |
| 53 | 10 | kinase | 35985_at | HG-U95A | AB023137 | NM_007203 | NP_009134 | AKAP2 | 9q31-q33 | 6 | |
| 54 | 10 | kinase | 36632_at | HG-U95A | U00957 | NM_007202 | NP_009133 | AKAP10 | 17pter-qter | | |
| 55 | 10 | kinase | 36805_s_at | HG-U95A | X03541 | NM_002529 | NP_002520 | NTRK1 | 1q21-q22 | | |
| 56 | 10 | kinase | 38120_at | HG-U95A | U50928 | NM_000297 | NP_000288 | PKD2 | 4q21-q23 | 2.8 | |
| 57 | 10 | kinase | 38433_at | HG-U95A | M76125 | NM_001699, | NP_001690, | AXL | 19qt3.1 | | |
| | | | | | | NM_021913 | NP_068713 | | | | |
| 58 | 12 | membrane protein | 1609_g_at | HG-U95A | J02958 | NM_000245 | NP_000236 | MET | 7q31 | | |
| 58 | 12 | membrane protein | 1812_s_at | HG-U95A | J02958 | NM_000245 | NP_000236 | MET | 7q31 | | |
| 58 | 12 | membrane protein | 35684_at | HG-U95A | J02958 | NM_000245 | NP_000236 | MET | 7q31 | | |
| 59 | 12 | membrane protein | 31610_at | HG-U95A | U21049 | NM_005764 | NP_005755 | DD96 | 1p32.3 | 6.3 | 11.4 |
| 60 | 12 | membrane protein | 35276_at | HG-U95A | AB000712 | NM_001305 | NP_001296 | CLDN4 | 7q11.23 | 2.3 | |
| 61 | 12 | membrane protein | 36194_at | HG-U95A | M63959 | NM_002337 | NP_002328 | LRPAP1 | 4p16.3 | | |
| 62 | 12 | membrane protein | 37168_at | HG-U95A | AB013924 | NM_014398 | NP_055213 | LAMP3 | 3q26.3-q27 | 6.3 | 3.6 |
| 63 | 12 | membrane protein | 38995_at | HG-U95A | AF000959 | NM_003277 | NP_003268 | CLDN5 | 22q11.21 | | |
| 64 | 12 | membrane protein | 39061_at | HG-U95A | D28137 | NM_004335 | NP_004326 | BST2 | 19p13.2 | 9.9 | 8.3 |
| 65 | 12 | membrane protein | 39695_at | HG-U95A | M31516 | NM_000574 | NP_000565 | OAF | 1q32 | 3.4 | 3.8 |
| 66 | 12 | membrane protein | 41045_at | HG-U95A | U77643 | NM_003004 | NP_002995 | SECTM1 | 17q25 | 6.5 | 5.2 |

| | lot 1 | | lot 2 | | | | | |
|---|---|---|---|---|---|---|---|---|
| | Day 7 | | Day 3 | Day 7 | | | SEQ ID NO: | SEQ ID NO: |
| | AI | IMM | AI | AI | title | reference | (nucleotide seq.) | (amino acid seq.) |
| 52 | 2.4 | | | 3.8 | p21 (CDKN1A)-activated | EMBO J. 14:- (1970) | 82 | 603 |
| | | | | | kinase 2 | | | |
| 53 | | 2.2 | 2.5 | 7.6 | A kinase (PRKA) anchor | Unpublished:- (2000) | 83 | 604 |
| | | | | | protein 2 | | | |
| 54 | 2 | | | 2.4 | A kinase (PRKA) anchor | Proc. Natl. Acad. Sci. | 84 | 605 |
| | | | | | protein 10 | U.S.A. 94: 11184-11189 | | |
| | | | | | | (1997) | | |
| 55 | 8.7 | 6.5 | | 4.9 | neurotrophic tyrosine | Nature 319: 743-748(1986) | 85 | 606 |
| | | | | | kinase, receptor, type 1 | | | |
| 56 | 2.7 | | 2.4 | | polycystin 2 | Nat Genet 5: 359- | 86 | 607 |
| | | | | | | 362(1993) | | |
| 57 | 2.2 | | | 7.5 | AXL receptor tyrosine | Mol. Cell. Biol. 11: 5016- | 87, 88 | 608, 609 |
| | | | | | kinase isoform 2 precursor | 5031 (1991) | | |
| | | | | | NM_021913 (analysis) AXL | | | |
| | | | | | receptor tyrosine kinase | | | |
| | | | | | isoform 1 precursor | | | |
| 58 | 2.6 | | | 3.4 | proto-oncogene met, | Nature: 318. 385-388 | 89 | 610 |
| | | | | | hepatocyte growth factor | (1985) | | |
| | | | | | receptor | | | |
| 58 | 5 | | | 5.8 | proto-oncogene met, | Nature: 318. 385-388 | 89 | 610 |
| | | | | | hepatocyte growth factor | (1985) | | |
| | | | | | receptor, alt. transcript 2 | | | |
| 58 | 3.4 | | | 2.4 | met proto-oncogene | Nature 318: 385-388 | 89 | 610 |
| | | | | | precursor | (1985) | | |
| 59 | 3.3 | 9.5 | 5.3 | 2.5 | | | 90 | 611 |
| 60 | | 2.1 | 2.2 | 23 | claudin 4 | J. Biol. Chem. 272: 26652- | 91 | 612 |
| | | | | | | 26658 (1997) | | |
| 61 | 2.2 | | | 2.2 | low density lipoprotein- | J. Biochem. 108: 297- | 92 | 613 |
| | | | | | related protein-associated | 302(1990) | | |
| | | | | | protein 1(alpha-2- | | | |
| | | | | | macroglobu | | | |
| 62 | | | 5.4 | 3 | similar to lysosome- | Cancer Res. 58: 3499-3503 | 93 | 614 |
| | | | | | associated membrane | (1998) | | |
| | | | | | glycoprotein | | | |
| 63 | 2.9 | 3.9 | | 8.3 | transmembrane protein | Genomics 42: 245- | 94 | 615 |
| | | | | | claudin 5 | 251(1997) | | |
| 64 | 3 | 5.4 | 5.8 | 3.1 | bone marrow stromal cell | Genomics 26: 527-534 | 95 | 616 |
| | | | | | antigen 2 | (1995) | | |
| 65 | 4.3 | 5.1 | 2.7 | 11.4 | decay accelerating factor | Nature 325: 545-549(1987) | 96 | 617 |
| | | | | | for complement (CD55, | | | |
| | | | | | Cromer blood group | | | |
| | | | | | system) | | | |
| 66 | 4.4 | 14 | 6.8 | 4.6 | secreted and | Genomics 47: 327- | 97 | 618 |
| | | | | | transmembrane 1 | 340(1998) | | |
| | | | | | precusor | | | |

[0408] TABLE 7

| | | | | | | | | | | lot 1 | |
|---|---|---|---|---|---|---|---|---|---|---|---|
| | Cat_{—} | | | | | | | | | Day 3 | |
| | tag | category | Probe ID | Chip | accession | RefSeq | RefSeq | gene symbol | map location | AI | IMM |
| 67 | 13 | metabolism | 32363_at | HG-U95A | AF059214 | NM_003956 | NP_003947 | CH25H | 10q23 | 9.9 | 8.9 |
| 68 | 13 | metabolism | 34636_at | HG-U95A | M23892 | NM_001140 | NP_001131 | ALOX15 | 17p13.3 | 47.8 | 69.2 |
| 69 | 13 | metabolism | 35017_f_at | HG-U95A | M80469 | NM_012399 | NP_036531 | PITPNB | 22q12.1 | | |
| 69 | 13 | metabolism | 353_at | HG-U95A | D30037 | NM_012399 | NP_036531 | PITPNB | 22q12.1 | | |
| 70 | 14 | MHC | 34427_g_at | HG-U95A | U22963 | NM_001531 | NP_001522 | HLALS | 1q25.3 | | |
| 71 | 14 | MHC | 35937_at | HG-U95A | U65416 | NM_005931 | NP_005922 | MICB | 6p21.3 | 3.3 | |
| 72 | 14 | MHC | 37420_i_at | HG-U95A | AL022723 | NM_018950 | NP_061823 | HLA-F | 6p21.3 | 2.9 | 3 |
| 72 | 14 | MHC | 37421_f_at | HG-U95A | AL022723 | NM_018950 | NP_061823 | HLA-F | 6p21.3 | | |
| 73 | 15 | MMP related | 34839_at | HG-U95A | AB029027 | NM_314889, | NP_055704, | MP1 | 10p15.2 | | |
| | | | | | | NM_014968 | NP_055783 | | | | |
| 74 | 15 | MMP related | 35479_at | HG-U95A | AJ242015 | NM_014265, | NP_055080, | ADAM28 | 8p21.1 | 9 | 4.8 |
| | | | | | | NM_021777, | NP_068547, | | | | |
| | | | | | | NM_021778 | NP_068548 | | | | |
| 75 | 15 | MMP related | 40712_at | HG-U95A | D26579 | NM_001109 | NP_001100 | ADAM8 | 10q26.3 | 5.8 | |
| 76 | 15 | MMP related | 668_s_at | HG-U95A | L22524 | NM_002423 | NP_002414 | MMP7 | 11q21-q22 | 2.6 | 2.2 |
| 77 | 16 | oncogenesis | 40292_at | HG-U95A | AF027734 | NM_014618 | NP_055433 | DBCCR1 | 9q32-q33 | | |

| | lot 1 | | lot 2 | | | | | |
|---|---|---|---|---|---|---|---|---|
| | Day 7 | | Day 3 | Day 7 | | | SEQ ID NO: | SEQ ID NO: |
| | AI | IMM | AI | AI | title | reference | (nucleotide seq.) | (amino acid seq.) |
| 67 | 15.1 | 11.4 | 14.9 | 12 | cholesterol 25- | J. Biol. Chem. 273. 34316- | 98 | 619 |
| | | | | | hydroxylase | 3437 (1998) | | |
| 68 | 72.3 | 118.8 | 112.2 | 322.1 | arachidonate 15- | Biochem. Biophys. | 99 | 620 |
| | | | | | lipoxygenase | Res. Commun. 157: 457- | | |
| | | | | | | 464(1988) | | |
| 69 | 2.3 | 2.1 | | 2.4 | phosphotidylinositol | Biochim. Biophys. Acta | 100 | 621 |
| | | | | | transfer protein, beta | 1259: 199-202 (1995) | | |
| 69 | 2.8 | | | 2 | phosphotidylinositol | Biochim. Biophys. Acta | 100 | 621 |
| | | | | | transfer protein, beta | 1259: 199-202 (1995) | | |
| 70 | 2 | | | 2 | major histocompatibiiity | Science 269: 693- | 101 | 622 |
| | | | | | complex, class I-like | 695(1995) | | |
| | | | | | sequence | | | |
| 71 | 3.5 | | 2.7 | 5.6 | MHC class I molecule | Proc. Natl. Acad. Sci. | 102 | 623 |
| | | | | | (MICB) gene | U.S.A. 91: 6259-6263 (1994) | | |
| 72 | 3.3 | 2.4 | | 2.8 | major histocompatibility | J. Exp. Med. 171: 1- | 103 | 624 |
| | | | | | complex, class I, F | 18(1990) | | |
| 73 | 2.4 | 2.1 | | 2.2 | major histocompatibility | J. Exp. Med. 171: 1- | 103 | 624 |
| | | | | | complex, class I, F | 18(1990) | | |
| 73 | 2 | | 2 | 2.4 | metalloprotease 1 | Unpublished:- (1998) | 104, 105 | 625, 626 |
| 74 | 5 | 6.4 | 3.5 | 3.7 | a disintegrin and | J. Biol. Chem. 274:-29251- | 106, 107, 108 | 627, 628. 629 |
| | | | | | metalloproteinase domain | 29259(1999) | | |
| | | | | | 28, isoform 1, isoform 2, | | | |
| | | | | | isoform 3 preproprotein | | | |
| 75 | 5.1 | 2.8 | 2.7 | 4.5 | a disintegrin and | Genomics 41: 56-62(1997) | 109 | 630 |
| | | | | | metalloproteinase domain | | | |
| | | | | | 8 precursor | | | |
| 76 | 2.8 | 2.8 | 3.4 | 2 | matrilysin | Biochem. J. 253: 187-192 | 110 | 631 |
| | | | | | | (1988) | | |
| 77 | 3.1 | | 7.9 | 19.3 | deleted in bladder cancer | Hum. Mol. Genet. 6: 913- | 111 | 632 |
| | | | | | chromosome region | 919 (1997) | | |
| | | | | | candidate 1 | | | |

[0409] TABLE 8

| | | | | | | | | | | lot 1 | |
|---|---|---|---|---|---|---|---|---|---|---|---|
| | Cat_{—} | | | | | | | | | Day 3 | |
| | tag | category | Probe ID | Chip | accession | RefSeq | RefSeq | gene symbol | map location | AI | IMM |
| 78 | 17 | others | 34484_at | HG-U95A | AI961669 | NM_006420 | NP_006411 | BIG2 | 20q13.13 | | |
| 79 | 17 | others | 38430_at | HG-U95A | AA128249 | NM_001442 | NP_001433 | FABP4 | 8q21 | 3.8 | 2.6 |
| 80 | 17 | others | 38612_at | HG-U95A | M69023 | NM_005724 | NP_005715 | TSPAN-3 | 15q23 | 2.2 | 2.5 |
| 81 | 17 | others | 39420_at | HG-U95A | S62138 | NM_004083 | NP_004074 | DDIT3 | 12q13.1- | | 2.3 |
| | | | | | | | | | q13.2 | | |
| 82 | 17 | others | 39959_at | HG-U95A | AL031983 | NM_006398 | NP_006389 | diubiquitin | 6p21.3 | 21.3 | 14.4 |
| 83 | 17 | others | 40456_at | HG-U95A | AL049963 | NM_022154 | NP_071437 | LOC64116 | 4q22-q24 | 2.2 | 2.9 |
| 84 | 17 | others | 34759_at | HG-U95A | U68494 | | | | | | |
| 85 | 19 | phosphatase | 38272_at | HG-U95A | AF038844 | NM_007026 | NP_068807 | MKP-L | 17q12 | 2 | |
| 86 | 19 | phosphatase | 677_s_at | HG-U95A | J04430 | NM_001611 | NP_001602 | ACP5 | I9p13.3- | −2.8 | |
| | | | | | | | | | p13.2 | | |
| 87 | 20 | protein binding protein | 41592_at | HG-U95A | AB000734 | NM_003745 | NP_003736 | SSI-1 | 16p13.13 | 5.6 | 5.8 |
| 88 | 21 | proteinase | 133_at | HG-U95A | X87212 | NM_001814 | NP_001805 | CTSC | 11q14.1- | 3.5 | 4.7 |
| | | | | | | | | | q14.3 | | |
| 89 | 21 | proteinase | 34702_f_at | HG-U95A | M27826 | | AAA65999 | HUMRTVLH3 | | | |
| 90 | 21 | proteinase | 40496_at | HG-U95A | J04080 | NM_001734 | NP_001725 | C1S | 12p13 | 3.3 | |
| 91 | 21 | proteinase | 811_at | HG-U95A | U64444 | NM_005659 | NP_005650 | UFD1L | 22q11.21 | 2.3 | 2.3 |

| | lot 1 | | lot 2 | | | | | |
|---|---|---|---|---|---|---|---|---|
| | Day 7 | | Day 3 | Day 7 | | | SEQ ID NO: | SEQ ID NO: |
| | AI | IMM | AI | AI | title | reference | (nucleotide seq.) | (amino acid seq.) |
| 78 | 2.2 | | | 2.9 | ADP-ribosylation factor | J. Biol. Chem. 274: 12308- | 112 | 633 |
| | | | | | guanine nucleotide- | 12315 (1999) | | |
| | | | | | exchange factor 2 | | | |
| 79 | | | 2.5 | | Fatty acid binding protein | Biochemistry 28 (22), | 113 | 634 |
| | | | | | 4, adipocyte | 8683-8690 (1989) | | |
| 80 | 2.7 | 3.2 | 2.5 | 2.7 | tetrespan 3 | J. Biol. Chem. 266: 17566- | 114 | 635 |
| | | | | | | 17572 (1991) | | |
| 81 | 5.2 | | | 29.5 | DNA-damage-inducible | Gene 116: 259-267(1992) | 115 | 636 |
| | | | | | transcript 3 | | | |
| 82 | 4.3 | 9.7 | 16.3 | | diubiquitin | Immunogenetics 44: 97- | 116 | 637 |
| | | | | | | 103(1996) | | |
| 83 | 2.8 | | 5.6 | 3 | up-regulated by BCG- | Unpublished:- ( ) | 117 | 638- |
| | | | | | CWS | | | |
| 84 | 2.5 | | | 2.9 | Human hbc647 mRNA | Hum. Mol. Genet 2: 1793- | 118 | — |
| | | | | | sequence | 1798 (1993) | | |
| 85 | 2.9 | | 2.5 | 5.1 | MKP-1 like protein | J. Biol. Chem. 273: 23722- | 119 | 639 |
| | | | | | tyrosine phosphatase | 23728 (1998) | | |
| 86 | 2.5 | | | 2.8 | tartrate resistant acid | J. Biol. Chem. 264 (1), | 120 | 640 |
| | | | | | phosphatase 5 precursor | 557-563 (1989) | | |
| 87 | 6.1 | 8.3 | 15.5 | 11.3 | JAK binding protein | Nature 387: 921-924 | 121 | 641 |
| | | | | | | (1997) | | |
| 88 | 2.8 | 5.6 | 3.9 | 2.2 | cathepsin C | FEBS Lett. 369 (2-3), | 122 | 642 |
| | | | | | | 326-330 (1995) | | |
| 89 | 6.1 | 7 | | 3.1 | endogenous retroviral | Gene: 79. 259-267 (1989) | 123 | 643 |
| | | | | | protease | | | |
| 90 | 4.8 | | | 4.1 | complement component 1, | Eur. J. Biochem. 169: 547- | 124 | 644 |
| | | | | | s subcomponent | 553 (1987) | | |
| 91 | 5.1 | 3.8 | 3.1 | 3.2 | ubiquitin fusion | Hum. Mol. Genet. 6: 259- | 125 | 645 |
| | | | | | degradation I-like | 265 (1997) | | |

[0410] TABLE 9

| | | | | | | | | | | lot 1 | |
|---|---|---|---|---|---|---|---|---|---|---|---|
| | Cat_{—} | | | | | | | | map | Day 3 | |
| | tag | category | Probe ID | Chip | accession | RefSeq | RefSeq | gene symbol | location | AI | IMM |
| 92 | 22 | proteinase inhibitor | 1549_s_at | HG-U95A | U19557 | XM_036951 | XP_036951 | SERPINB4 | 18q21.3 | 4.2 | 67.4 |
| 93 | 22 | proteinase inhibitor | 32620_at | HG-U95A | AB017551 | NM_014375 | NP_055190 | FETUB | 3q27 | 3.7 | 4.1 |
| 93 | 22 | proteinase inhibitor | 33101_g_at | HG-U95A | AB017551 | NM_014375 | NP_055190 | FETUB | 3q27 | 2.2 | |
| 94 | 22 | proteinase inhibitor | 34789_at | HG-U95A | S69272 | NM_004568 | NP_004559 | SERPINB6 | 6p25 | 2.2 | 2.6 |
| 95 | 22 | proteinase inhibitor | 37185_at | HG-U95A | Y00630 | NM_002575 | NP_002566 | SERPINB2 | 18q21.3 | 2.1 | |
| 96 | 24 | signal | 32005_at | HG-U95A | M57703 | NM_002674 | NP_002665 | PMCH | 12q23-q24 | | 3.3 |
| | | transaction | | | | | | | | | |
| 97 | 24 | signal | 33291_at | HG-U95A | AF081195 | NM_005739 | NP_005730 | RASGRP1 | 15q15 | | 2.6 |
| | | transaction | | | | | | | | | |
| 98 | 24 | signal | 37014_at | HG-U95A | M33882 | NM_002462 | NP_002453 | MXI | 21q22.3 | 12.3 | 10.6 |
| | | transaction | | | | | | | | | |
| 99 | 24 | signal | 37890_at | HG-U95A | X69398 | NM_001777 | NP_001768 | CD47 | 3q13.1-q13.2 | 2.1 | |
| | | transaction | | | | | | | | | |
| 100 | 24 | signal | 626_s_at | HG-U95A | L78833 | | AAC37594 | BRCA1 | 17n21 | 9.1 | 7.6 |
| | | transaction | | | | | | | | | |
| 101 | 24 | signal | 879_at | HG-U95A | M30818 | NM_002463 | NP_002454 | MX2 | 21q22.3 | 8.7 | 8 |
| | | transduction | | | | | | | | | |
| 102 | 25 | structural | 39951_at | HG-U95A | L20826 | NM_002670 | NP_002661 | PLS1 | 3q24 | 2.5 | 2.9 |
| | | protein | | | | | | | | | |
| 103 | 25 | structural | 601_s_at | HG-U95A | M28439 | NM_005557 | NP_005548 | KRT16 | 17q12-q21 | | 4.6 |
| | | protein | | | | | | | | | |

| | lot 1 | | lot 2 | | | | SEQ ID NO: | SEQ ID NO: |
|---|---|---|---|---|---|---|---|---|
| | Day 7 | | Day 3 | Day 7 | | | (nucleotide | (amino |
| | AI | IMM | AI | AI | title | reference | seq.) | acid seq.) |
| 92 | 7.8 | 23.9 | 9.6 | 15 | serine (or cysteine) | Proc Natl. Acad. Sci USA. | 126 | 646 |
| | | | | | proteinase inhibitor, c ade | 1995 Apr 11; 92(8): 3147- | | |
| | | | | | B (ovalbumin), member 4 | 51. | | |
| 93 | 8.4 | 7.4 | 37.6 | | fetuin B | Biochem. J. 350: 589-597 | 127 | 647 |
| | | | | | | (2000) | | |
| 93 | 9 | 7.7 | 24.7 | | fetuin B | | 127 | 647 |
| 94 | 2 | | 2.1 | | serine (or cysteine) | Proc. Natl. Acad. | 128 | 648 |
| | | | | | proteinase inhibitor, clade | Sci. U.S.A. 90: 9417- | | |
| | | | | | B (ovalbumin), member 6 | 9421(1993) | | |
| 95 | 5.3 | 3 | 4.1 | 3.4 | serine (or cysteine) | J. Biol. Chem. 262: 3718- | 129 | 649 |
| | | | | | proteinase inhibitor, clade | 3725 (1987) | | |
| | | | | | B (ovalbumin), member 2 | | | |
| 96 | 11 | | 12.2 | 4.3 | pro-melanin- | Mol. Endocrinol 4: 632-637 | 130 | 650 |
| | | | | | concentrating hormone | (1990) | | |
| 97 | 2.8 | 3.3 | 3.7 | 4.2 | RAS guanyl releasing | Proc. Natl. Acad. Sci. | 131 | 651 |
| | | | | | protein 1 | U.S.A. 95: 13278-13283 | | |
| | | | | | | (1998) | | |
| 98 | 2.9 | 11.2 | 11.4 | 4.2 | myxovirus (influenza virus) | Mol. Cell. Biol. 9 (11), | 132 | 652 |
| | | | | | resistance 1, interferon- | 5062-5072 (1989) | | |
| | | | | | inducible protein p78 | | | |
| | | | | | (mouse) | | | |
| 99 | | | 2.4 | | CD47 antigen (Rh-related | | 133 | 653 |
| | | | | | antigen, integrin- | | | |
| | | | | | associated signal | | | |
| | | | | | transducer) | | | |
| 100 | | 2.4 | 19.3 | | BRCA1, Rho7 and vatI | Genome Res. 6, 1029- | 134 | 654 |
| | | | | | genes | 1049 (1996) | | |
| 101 | | 2.4 | 6.9 | | myxovirus (influenza virus | Mol. Cell. Biol. 9: 5062- | 135 | 655 |
| | | | | | resistance 2 (mouse) | 5072(1989) | | |
| 102 | 5.4 | 7.9 | 3.1 | | plastin 1 | J. Biol. Chem. 268: 2781- | 136 | 656 |
| | | | | | | 2792 (1993) | | |
| 103 | 3.6 | 3.5 | 5.2 | 2 | keratin type 16 gene, | Mol. Cell. Biol. 6: 539- | 131 | 657 |
| | | | | | exon 8 | 548(1986) | | |

[0411] TABLE 10

| | | | | | | | | | | lot 1 | |
|---|---|---|---|---|---|---|---|---|---|---|---|
| | Cat_{—} | | | | | | | | map | Day 3 | |
| | tag | category | Probe ID | Chip | accession | RefSeq | RefSeq | gene symbol | location | AI | IMM |
| 104 | 26 | transcription factor | 32859_at | HG-U95A | M97935 | NM_007315 | NP_009330 | STAT1 | 2q32.2 | | |
| 104 | 26 | transcription factor | 32860_g_at | HG-U95A | M97935 | NM_007315 | NP_009330 | STAT1 | 2q32.2 | 2.8 | 2.4 |
| 104 | 26 | transcription factor | 33338_at | HG-U95A | M97936 | NM_007315 | NP_009330 | STAT1 | 2q32.2 | 9.7 | 5.7 |
| 104 | 26 | transcription factor | 33339_g_at | HG-U95A | M97936 | NM_007315 | NP_009330 | STAT1 | 2q32.2 | 3.5 | |
| 105 | 26 | transcription factor | 32961_at | HG-U95A | X63417 | XM_050909 | XP_050909 | IRLB | 15q22.1 | | |
| 106 | 26 | transcription factor | 33288_i_at | HG-U95A | D88827 | NM_005741 | NP_005732 | ZNF263 | 16p13.3 | | |
| 107 | 26 | transcription factor | 35432_at | HG-U95A | AF074723 | NM_005466 | NP_005457 | MED6 | 14q24.1 | | |
| 108 | 26 | transcription factor | 36412_s_at | HG-U95A | U53831 | NM_001572, | NP_001563, | IRF7 | 11p15.5 | 4.9 | 2.5 |
| | | | | | | NM_004029, | NP_004020, | | | | |
| | | | | | | NM_004030, | NP_004021, | | | | |
| | | | | | | NM_004031 | NP_004022 | | | | |
| 109 | 26 | transcription factor | 37544_at | HG-U95A | X64318 | NM_005384 | NP_005375 | NFIL3 | 9q22 | | |
| 110 | 27 | transporter | 36376_at | HG-U95A | AF030880 | NM_000441 | NP_000432 | SLC26A4 | 7q31 | 18.8 | 25.6 |
| 111 | 27 | transporter | 41038_at | HG-U95A | M32011 | NM_000433 | NP_000424 | NCF2 | 1q25 | 2.9 | |

| | lot 1 | | lot 2 | | | | SEQ ID NO: | SEQ ID NO: |
|---|---|---|---|---|---|---|---|---|
| | Day 7 | | Day 3 | Day 7 | | | (nucleotide | (amino |
| | AI | IMM | AI | AI | title | reference | seq.) | acid seq.) |
| 104 | 2.1 | | | 2.6 | STAT1 | | 138 | 658 |
| 104 | | | 2.1 | | STAT1 | | 138 | 658 |
| 104 | | | 5.8 | | STAT1 | Proc Natl Acad Sci USA, | 138 | 658 |
| | | | | | | 89: 7836-7839 (1992) | | |
| 104 | | 2.1 | 3.2 | 2.5 | STAT1 | | 138 | 658 |
| 105 | 2.5 | | | 2 | c-myc promoter-binding | Unpublished:- (2002) | 139 | 659 |
| | | | | | protein | | | |
| 106 | 2.6 | | | 2 | zinc finger protein 263 | Unpublished:- (1996) | 140 | 660 |
| 107 | 2.7 | | | 2 | RNA polymerase D | Mol. Cell. Biol. 17: 4622- | 141 | 661 |
| | | | | | transcriptional regulation | 4632 (1997) | | |
| | | | | | mediator (Med6) | | | |
| 108 | | | 3.4 | 3.6 | interferon regulatory | Mol. Cell. Biol. 17: 5748- | 142, 143, | 662, 663, |
| | | | | | factor 7 mRNA, isoform a | 5757 (1997) | 144, 145 | 664, 665 |
| | | | | | d | | | |
| 109 | 2.5 | | | 2.7 | nuclear factor, interleukin | Mol. Cell. Biol. 12: 3070- | 146 | 666 |
| | | | | | 3 regulated | 3077 (1992) | | |
| 110 | 20.1 | 28.5 | 118.3 | 58.2 | pendrin | Hum. Mol. Genet. 4: 1637- | 147 | 667 |
| | | | | | | 1642 (1995) | | |
| 111 | 4 | | 4.4 | 4.2 | neutrophil cytosolic factor | Science 248: 727-730 | 148 | 668 |
| | | | | | 2 | (1990) | | |

[0412] TABLE 11

| | | | | | | | | | | lot 1 | |
|---|---|---|---|---|---|---|---|---|---|---|---|
| | Cat_{—} | | | | | | | gene | | Day 3 | |
| | tag | category | Probe ID | Chip | accession | RefSeq | RefSeq | symbol | map location | AI | IMM |
| 1 | 2 | cell adhesion | 46916_at | HG-U95B | AA454985 | NM_021810 | NP_068582 | CDH26 | 20q13.2- | 8.9 | 16 |
| | | | | | | | | | q13.33 | | |
| 2 | 2 | cell adhesion | 57421_at | HG-U95B | AI928108 | NM_004932 | NP_004923 | CDH6 | 5p15.1-p14 | 3.5 | 4.7 |
| 3 | 4 | chemokine | 44095_at | HG-U95B | AAM7076 | NM_022059 | NP_071342 | CXCL16 | 17p13 | 2.5 | 2.5 |
| 4 | 5 | cytokine related | 47855_at | HG-U95B | AA151656 | NM_013371 | NP_037503 | IL19 | 1q32.2 | 4 | 9.1 |
| 5 | 6 | cytosolic protein | 47634_at | HG-U95B | AW052044 | NM_005347 | NP_005338 | HSPA5 | 9q33-q34.1 | | |
| 6 | 7 | enzyme | 43394_s_at | HG-U95B | AW005365 | NM_021727 | NP_068373 | FADS3 | 11q12-q13.1 | | |
| 7 | 7 | enzyme | 48918_at | HG-U95B | AA432381 | NM_000625 | NP_000616 | NOS2A | 17q11.2-q12 | 4.3 | |
| 8 | 7 | enzyme | 51920_at | HG-U95B | AA134958 | NM_022168 | NP_071451 | MDA5 | 2p24.3-q24.3 | 6.6 | 5.2 |
| 9 | 7 | enzyme | 54604_at | HG-U95B | AI338972 | NM_005329 | NP_005320 | HAS3 | 16q22.1 | 2.3 | |
| | | | | | | NM_138612 | NP_619515 | | | | |
| 10 | 7 | enzyme | 57151_at | HG-U95B | T66196 | NM_005737 | NP_005728 | ARL7 | 2q37.2 | | 3.2 |
| 11 | 7 | enzyme | 59215_at | HG-U95B | AI807018 | NM_014314 | NP_055129 | RIG-1 | 9p12 | 7.2 | 8.7 |
| 12 | 7 | enzyme | 51925_at | HG-U95B | AA149682 | | | | | 2.9 | 2.4 |

| | lot 1 | | lot 2 | | | | SEQ ID NO: | SEQ ID NO: |
|---|---|---|---|---|---|---|---|---|
| | Day 7 | | Day 3 | Day 7 | | | (nucleotide | (amino |
| | AI | IMM | AI | AI | title | reference | seq.) | acid seq.) |
| 1 | 8.6 | 9.3 | 10.5 | 5.4 | cadherin-like 26 | unpublished | 149 | 669 |
| 2 | 3.8 | 4.5 | 2.9 | 3.7 | | | 150 | 670 |
| 3 | 4 | 2.6 | 2.3 | 2 | chemokine (C-X-C motif) | Nat Immunol. 1: 298-304 | 151 | 671 |
| | | | | | ligand 16 | (2000) | | |
| 4 | | 2.6 | 10.9 | | interleukin 19 | Unpublished:- ( ) | 152 | 672 |
| 5 | 2.7 | | 3.7 | 2.6 | heat shock 70 kD protein 5 | — | 153 | 673 |
| | | | | | (glucose-regulated protein, | | | |
| | | | | | 78 kD) | | | |
| 6 | 4.5 | | | 9.8 | Fatty acid desaturase 3 | Genomics 66: 175-183(2000) | 154 | 674 |
| 7 | 8.3 | 2.5 | 25.4 | | nitric oxide synthase 2A | Proc. Natl. Acad. Sci. U.S.A. | 155 | 675 |
| | | | | | (inducible, hepatocytes) | 90: 3491-3495(1993) | | |
| 8 | 3.8 | 2.8 | 3.3 | 2.8 | melanoma differentiation | Unpublished:- 0 | 156 | 676 |
| | | | | | associated protein-5 | | | |
| 9 | | 2.2 | 2 | | hyaluronan synthase 3 | J. Biol. Chem. 272: 8957- | 157, 158 | 677, 678 |
| | | | | | | 8961 (1997) | | |
| 10 | 3.1 | | 6.1 | 5.3 | ADP-ribosylation factor-like | FEBS Lett, 456:384-388 | 159 | 679 |
| | | | | | 7 | (1999) | | |
| 11 | 2.8 | 3.8 | 11.8 | | RNA helicase | Thesis: - (1997) | 160 | 680 |
| 12 | | | 2.2 | | ESTs, Weakly similar to | Genome Res. 6 (9): 807-28 | 161 | — |
| | | | | | phosphatidylserine-specific | 1996 | | |
| | | | | | phospholipase A1 deltaC | | | |
| | | | | | [H. sapiens] | | | |

[0413] TABLE 12

| | | | | | | | | | | lot 1 | |
|---|---|---|---|---|---|---|---|---|---|---|---|
| | Cat_{—} | | | | | | | gene | map | Day 3 | |
| | tag | category | Probe ID | Chip | accession | RefSeq | RefSeq | symbol | location | AI | IMM |
| 13 | 8 | hypothetical | 43366_at | HG-U95B | AI979079 | NM_018043 | NP_060513 | FLJ10261 | 1q13.1 | 7.9 | 8.2 |
| | | protein | | | | | | | | | |
| 13 | 8 | hypothetical | 43963_at | HG-U95B | AI703454 | NM_018043 | NP_060513 | FLJ10261 | 1q13.1 | | 6.6 |
| | | protein | | | | | | | | | |
| 14 | 8 | hypothetical | 46233_at | HG-U95B | A13414B8 | NM_017812 | NP_060282 | FLJ20420 | 7q32.3 | | |
| | | protein | | | | | | | | | |
| 15 | 8 | hypothetical | 50209_at | HG-U95B | AI630208 | NM_024920 | NP_079196 | FLJ14281 | 4q22.3 | | |
| | | protein | | | | | | | | | |
| 16 | 8 | hypothetical | 53777_at | HG-U95B | AI672353 | NM_022750 | NP_073587 | FLJ22693 | 7q34 | 2.8 | 2.1 |
| | | protein | | | | | | | | | |
| 17 | 8 | hypothetical | 56959_at | HG-U95B | AI376649 | NM_024724 | NP_079000 | FLJ22332 | 3q23 | | |
| | | protein | | | | | | | | | |
| 18 | 8 | hypothetical | 57197_at | HG-U95B | AA906378 | NM_030915 | NP_112177 | DKFZP566J091 | 2p23.3 | 9.4 | 8.2 |
| | | protein | | | | | | | | | |
| 19 | 8 | hypothetical | 58957_at | HG-U95B | AI620475 | NM_017912 | NP_060382 | C21orf11 | 21q22.3 | 6.6 | 6.2 |
| | | protein | | | | | | | | | |
| 20 | 8 | hypothetical | 44127_at | HG-U95B | AA604375 | | | | | | |
| | | protein | | | | | | | | | |
| 21 | 8 | hypothetical | 46658_at | HG-U95B | AI700705 | | | | | | |
| | | protein | | | | | | | | | |
| 22 | 8 | hypothetical | 47087_at | HG-U95B | AI310524 | | | | | 3.6 | |
| | | protein | | | | | | | | | |
| 23 | 8 | hypothetical | 48826_s_at | HG-U95B | AW019985 | | | | | | 6 |
| | | protein | | | | | | | | | |
| 24 | 8 | hypothetical | 52307_at | HG-U95B | AA582926 | | | | | 2.4 | |
| | | protein | | | | | | | | | |
| 25 | 8 | hypothetical | 52327_s_at | HG-U95B | AI989346 | | | | | 2.9 | 2.3 |
| | | protein | | | | | | | | | |
| 26 | 8 | hypothetical | 52539_at | HG-U95B | AA420479 | | | | | 3.8 | |
| | | protein | | | | | | | | | |
| 27 | 8 | hypothetical | 52622_at | HG-U95B | AA541787 | | | | | 3.3 | 2.6 |
| | | protein | | | | | | | | | |
| 28 | 8 | hypothetical | 53010_at | HG-U95B | AI809925 | | | | | 3.1 | |
| | | protein | | | | | | | | | |
| 29 | 8 | hypothetical | 53061_at | HG-U95B | AI718385 | | | | | 4.6 | |
| | | protein | | | | | | | | | |
| 30 | 8 | hypothetical | 54033_at | HG-U95B | AI659927 | | | | | 4.2 | 8.3 |
| | | protein | | | | | | | | | |
| 31 | 8 | hypothetical | 54886_at | HG-U95B | AI565105 | | | | | 2.8 | 2.2 |
| | | protein | | | | | | | | | |
| 32 | 8 | hypothetical | 54897_at | HG-U95B | AA167714 | | | | | | |
| | | protein | | | | | | | | | |
| 33 | 8 | hypothetical | 57050_at | HG-U95B | AA127987 | | | KIAA1268 | 3q21.1 | 3.2 | 2.8 |
| | | protein | | | | | | | | | |
| 34 | 8 | hypothetical | 59516_at | HG-U95B | AA210695 | | | KIAAI268 | 3q21.1 | 4.1 | |
| | | protein | | | | | | | | | |
| 35 | 8 | hypothetical | 57694_at | HG-U95B | AI821796 | | | | | | |
| | | protein | | | | | | | | | |
| 36 | 8 | hypothetical | 57696_at | HG-U95B | W06879 | | | | | | |
| | | protein | | | | | | | | | |

| | lot 1 | | lot 2 | | | | SEQ ID NO: | SEQ ID NO: |
|---|---|---|---|---|---|---|---|---|
| | Day 7 | | Day 3 | Day 7 | | | (nucleotide | (amino acid |
| | AI | IMM | AI | AI | title | reference | seq.) | seq.) |
| 13 | 10.6 | 8.4 | 11.2 | 7.9 | hypothetical protein | Unpublished: - (2000) | 162 | 681 |
| | | | | | FLJ10261 | | | |
| 13 | 8.7 | | 14.4 | 6.2 | hypothetical protein | Unpublished: - (2000) | 162 | 681 |
| | | | | | FLJ10261 | | | |
| 14 | 2.1 | | | — | hypothetical protein | Unpublished | 163 | 682 |
| | | | | | FLJ20420 | | | |
| 15 | 2.5 | | | 2 | hypothetical protein | Unpublished | 164 | 683 |
| | | | | | FLJ14281 | | | |
| 16 | | 2.2 | 2.2 | 1.6 | hypothetical protein | Genome Res. 11: 422- | 165 | 684 |
| | | | | | FLJ221693 | 435(2001) | | |
| 17 | 3.4 | | | 3.6 | hypothetical protein | Unpublished: - (2001) | 166 | 685 |
| | | | | | FLJ22332 | | | |
| 18 | 11.3 | 4.2 | 45.3 | 15.2 | hypothetical protein | Genome Res. 11: 422-435 | 167 | 686 |
| | | | | | DKFZp566J091 | (2001) | | |
| 19 | 2.1 | 6 | 7.1 | 2.4 | hypothetical protein | Unpublished | 168 | 687 |
| | | | | | FLJ20637 | | | |
| 20 | 2.5 | | 2.1 | 3.9 | Homo sapiens mRNA full | Unpublished | 169 | — |
| | | | | | length insert cDNA clone | | | |
| | | | | | EUROIMAGE 994846 | | | |
| 21 | 2.4 | | | 2.5 | FLJ31051 fis, clone | Unpublished | 170 | — |
| | | | | | HSYRA2000605, weakly | | | |
| | | | | | similar to MYOSIN HEAVY | | | |
| | | | | | CHAIN, CLONE 203 | | | |
| 22 | | | 2 | | Homo sapiens cDNA | Unpublished | 171 | — |
| | | | | | FLJ25117 fis, clone | | | |
| 23 | 6.9 | 10.8 | 9.8 | 14.7 | Homo sapiens mRNA: cDNA | Genomics 23: 42-50 1994 | 172 | — |
| | | | | | DKFZp434D0818 (from clone | | | |
| | | | | | DKFZp434D0818) | | | |
| 24 | 3.8 | | 2.2 | 3.7 | Homo sapiens mRNA full | Unpublished | 173 | — |
| | | | | | length insert cDNA clone | | | |
| | | | | | EUROIMAGE 994846 | | | |
| 25 | 2.7 | 2.1 | 2.2 | 2.5 | Homo sapiens mRNA; cDNA | Unpublished | 174 | — |
| | | | | | DKFZp434G227 (from clone | | | |
| | | | | | DKFZp434G227) | | | |
| 26 | 4.1 | | 2.2 | 10.1 | Homo sapiens mRNA full | Unpublished | 175 | — |
| | | | | | length insert cDNA clone | | | |
| | | | | | EUROIMAGE 994846 | | | |
| 27 | | | 2.2 | 3.9 | Homo sapiens cDNA | Unpublished | 176 | — |
| | | | | | FLJ11812 fis, clone | | | |
| | | | | | HEMBA1006364 | | | |
| 28 | 3.6 | 2.8 | 2.2 | | Homo sapiens mRNA full | Unpublished | 177 | — |
| | | | | | length insert cDNA clone | | | |
| | | | | | EUROIMAGE 2068071 | | | |
| 29 | | 3.2 | 2.2 | | Homo sapiens cDNA: | Unpublished | 178 | — |
| | | | | | FLJ21425 fis, clone | | | |
| | | | | | COL04162 | | | |
| 30 | 4.2 | 11 | 4.6 | 3 | FLJ22547 fis, clone | Unpublished | 179 | — |
| | | | | | HSI00356 | | | |
| 31 | 2.4 | | 2.2 | 2.4 | Homo sapiens mRNA: cDNA | Unpublished | 180 | — |
| | | | | | DKFZp434G227 (from clone | | | |
| | | | | | DKFZp434G227) | | | |
| 32 | 3.9 | | 2.9 | 4.7 | FLJ31586 fis, clone | Unpublished | 181 | — |
| | | | | | NT2RI2002211 | | | |
| 33 | | 2.4 | 2.2 | 1.7 | KIAA1268 protein | Unpublished | 182 | — |
| 34 | | 4 | 2.2 | 5.9 | KIAA1268 protein | Unpublished | 183 | — |
| 35 | 3 | | | 2.5 | F-box only protein 22 | Unpublished | 184 | — |
| 36 | 2.1 | | | 2 | F-box only protein 22 | Unpublished | 185 | — |

[0414] TABLE 13

| | | | | | | | | | | | |
|---|---|---|---|---|---|---|---|---|---|---|---|
| 37 | 8 | hypothetical protein | 59036_at | HG-U95B | M702248 | 3.5 | 16.5 | FLJ14241 fis, clone | Unpublished | 186 | — |
| | | | | | | | | OVARC1000533 | | | |

| | | | | | | | | | | lot 1 | |
|---|---|---|---|---|---|---|---|---|---|---|---|
| | Cat_{—} | | | | | | | gene | map | Day 3 | |
| | tag | category | Probe ID | Chip | accession | RefSeq | RefSeq | symbol | location | AI | IMM |
| 38 | 9 | interferon- | 48864_at | HG-U95B | AI991845 | NM_005532 | NP_005523 | IFI27 | 14q32 | 2.9 | 4 |
| | | inducible | | | | | | | | | |
| | | protein | | | | | | | | | |
| 39 | 9 | interferon- | 52615_at | HG-U95B | AA948319 | NM_052942 | NP_443174 | GBP5 | 1p22.1 | 2.4 | 2.5 |
| | | inducible | | | | | | | | | |
| | | protein | | | | | | | | | |
| 40 | 10 | kinase | 46459_at | HG-U95B | AI806723 | NM_000293 | NP_000284 | PHKB | 16q12-q13 | 2 | |
| 41 | 10 | kinase | 48035_at | HG-U95B | AA101125 | NM_007203 | NP_009134 | AKAP2 | 9q31-q33 | 6.6 | |
| 42 | 10 | kinase | 51085_at | HG-U95B | AW005054 | NM_020397 | NP_065130 | LOC57118 | 10p13 | 2.4 | 3 |
| 43 | 10 | kinase | 51923_at | HG-U95B | AI769914 | NM_021972 | NP_068807 | SPHK1 | 17q25.2 | | |
| 44 | 10 | kinase | 56474_at | HG-U95B | W23068 | NM_014365 | NP_055180 | H11 | 12q24.23 | | |
| 45 | 12 | membrane | 46260_at | HG-U95B | AI452474 | NM_021101 | NP_066924 | CLDN1 | 3q28-q29 | 2.4 | |
| | | protein | | | | | | | | | |
| 46 | 12 | membrane | 50320_g_at | HG-U95B | AI497833 | NM_002856 | NP_002847 | PVRL2 | 19q13.2- | | |
| | | protein | | | | | | | q13.4 | | |
| 47 | 12 | membrane | 51628_at | HG-U95B | M009692 | NM_032048 | NP_114437 | EMILIN-2 | 18p11.3 | 2.1 | 2.8 |
| | | protein | | | | | | | | | |
| 48 | 14 | MHC | 49203_f_at | HG-U95B | AI829080 | NM_018950 | NP_064602 | HLA-F | 6p21.3 | 2.4 | 3.1 |
| 49 | 16 | oncogenesis | 50388_at | HG-U95B | AA044708 | NM_004225 | NP_004216 | MFHAS1 | 8p23.1 | 2.3 | |
| 50 | 16 | oncogenesis | 52167_at | HG-U95B | AA151346 | NM_031458 | NP_113646 | BAL | 3q13-q21 | 3.5 | 3.6 |

| | lot 1 | | lot 2 | | | | SEQ ID NO: | SEQ ID NO: |
|---|---|---|---|---|---|---|---|---|
| | Day 7 | | Day 3 | Day 7 | | | (nucleotide | (amino acid |
| | AI | IMM | AI | AI | title | reference | seq.) | seq.) |
| 38 | | | 2.1 | 3.3 | | | 187 | 688 |
| 39 | | | 4.5 | | guanylate binding protein 5 | Unpublished | 188 | 689 |
| 40 | | −2.7 | | | phosphorylase kinase, beta | Eur. J. Biochem. 238: 374- | 189 | 690 |
| | | | | | | 380 (1996) | | |
| 41 | 4.4 | | 3 | 6.4 | A kinase (PRKA) anchor | Unpublished | 190 | 691 |
| | | | | | protein 2 | | | |
| 42 | 2.2 | 5 | 2.7 | | CamKI-like protein kinase | Blood 96: 3215-3223 (2000) | 191 | 692 |
| 43 | 2.1 | | | 2.5 | sphingosine kinase 1 | J. Biol. Chem. 273: 23722- | 192 | 693 |
| | | | | | | 23728 (1998) | | |
| 44 | 2.3 | | | 2.1 | protein kinase H11 | J. Biol. Chem. 275: 25690- | 193 | 694 |
| | | | | | | 25699 (2000) | | |
| 45 | | | 2.4 | 3.6 | claudin 1 | Unpublished: - (1998) | 194 | 695 |
| 46 | 2.2 | | 2.2 | 2.2 | poliovirus receptor-related 2 | Gene 159: 267-272 (1995) | 195 | 696 |
| | | | | | (herpesvirus entry mediator | | | |
| | | | | | B) | | | |
| 47 | 3.1 | 5 | 2.9 | | extracellular glycoprotein | J. Biol. Chem. 276: 12003- | 196 | 697 |
| | | | | | EMILIN-2 precursor | 12011 (2001) | | |
| 48 | 3.4 | 2.1 | | 2.8 | major histocompatibility | Unpublished | 197 | 698 |
| | | | | | complex, class I, F | | | |
| 49 | 2.3 | 2.6 | 2.4 | 2.4 | malignant fibrous | Cancer Res. 59: 511-515 | 198 | 699 |
| | | | | | histiocytoma amplified | (1999) | | |
| | | | | | sequence 1 | | | |
| 50 | | | 2.7 | 1.6 | B aggressive lymphoma gene | Blood 96: 4328-4334 (2000) | 199 | 700 |

[0415] TABLE 14

| | | | | | | | | | | lot 1 | |
|---|---|---|---|---|---|---|---|---|---|---|---|
| | Cat_{—} | | | | | | | gene | map | Day 3 | |
| | tag | category | Probe ID | Chip | accession | RefSeq | RefSeq | symbol | location | AI | IMM |
| 51 | 17 | others | 44583_at | HG-U95B | AA603344 | NM_015474 | NP_056289 | SAMHD1 | 20pter-q12 | 6.6 | 4.3 |
| 52 | 17 | others | 46278_at | HG-U95B | N58274 | NM_013399 | NP_037531 | C16orf5 | 16p13.3 | | |
| 53 | 17 | others | 48368_at | HG-U95B | AA262083 | NM_016072 | NP_057156 | LOC51026 | 12p12.1 | | |
| 54 | 17 | others | 50094_at | HG-U95B | AA102575 | NM_004657 | NP_004648 | SDPR | 2q32-q33 | | 2.5 |
| 55 | 17 | others | 50396_at | HG-U95B | AI979251 | NM_020375 | NP_065108 | C12orf5 | 12p13.3 | | |
| 56 | 17 | others | 51236_at | HG-U95B | AI921740 | NM_016118 | NP_057202 | LOC51667 | 7q36 | | 4.8 |
| 57 | 17 | others | 59657_at | HG-U95B | AI038272 | NM_058186 | NP_478066 | C21orf11 | 21q22.3 | 2.6 | 4.6 |
| 58 | 17 | others | 52675_at | HG-U95B | AI581142 | | | KIAA1971 | 15q24.2 | | |
| 59 | 18 | P450 | 47627_at | HG-U95B | AI445492 | NM_030622 | NP_085125 | CYP2S1 | 19q13.1 | | |
| 60 | 20 | protein | 48838_s_at | HG-U95B | AI056051 | NM_003745 | NP_003736 | SSI-1 | 16p13.13 | 5.4 | |
| | | binding protein | | | | | | | | | |
| 61 | 20 | protein | 47500_i_at | HG_U95B | AA805337 | | | IRLB | 15q22.1 | 2.8 | |
| | | binding protein | | | | | | | | | |
| 62 | 21 | proteinase | 51972_at | HG-U95B | AA143794 | NM_017414 | NP_059110 | USP18 | 22q11.21 | 7.8 | 7.7 |
| 63 | 24 | signal | 55059_at | HG-U95B | AW052069 | NM_013324 | NP_037456 | CISH | 3p21.3 | 11.3 | 12.4 |
| | | transduction | | | | | | | | | |
| 64 | 24 | signal | 55107_at | HG-U95B | AI916306 | NM_014600 | NP_055415 | EHD3 | 2p21 | 2.3 | |
| | | transduction | | | | | | | | | |
| 65 | 24 | signal | 59759_i_at | HG-U95B | AA648933 | | | | | 2 | |
| | | transduction | | | | | | | | | |
| 66 | 25 | structural | 48684_at | HG-U95B | AI961431 | NM_015515 | NP_056330 | HAIK1 | 17q21.1 | 3.2 | 2.2 |
| | | protein | | | | | | | | | |

| | lot 1 | | lot 2 | | | | SEQ ID NO: | SEQ ID NO: |
|---|---|---|---|---|---|---|---|---|
| | Day 7 | | Day 3 | Day 7 | | | (nucleotide | (amino acid |
| | AI | IMM | AI | AI | title | reference | seq.) | seq.) |
| 51 | | 2.9 | 6.2 | | SAM domain and HD domain, | Immunol. Lett. 74: 221-224 | 200 | 701 |
| | | | | | 1 | (2000 | | |
| 52 | 4.6 | | | 7.7 | chromosome 16 open reading | J. Hum. Genet. 44: 383-387 | 201 | 702 |
| | | | | | frame 5 | (1999) | | |
| 53 | 2.9 | | | 2.4 | CGI-141 protein | Unpublished: - (2000) | 202 | 703 |
| 54 | 2.3 | 2.4 | 4.6 | 2.7 | serum deprivation response | Biochem. J. 269: 729-734 | 203 | 704 |
| | | | | | (phosphatidylserine-binding | (1990) | | |
| | | | | | protein) | | | |
| 55 | 3.5 | 2.1 | 2.3 | 3.6 | chromosome 12 open reading | Nat. Genet. 26: 345- | 204 | 705 |
| | | | | | frame 5 | 348 (2000) | | |
| 56 | 3.7 | 3.7 | | 3 | NEDD8 ultimate buster-1 | Unpublished | 205 | 706 |
| 57 | 6.6 | 7.3 | 3.7 | | chromosome 21 open reading | Unpublished | 206 | 707 |
| | | | | | frame 11 | | | |
| 58 | 2 | | | 3.3 | ESTs, Weakly similar to | Unpublished | 207 | — |
| | | | | | T00329 hypothetical protein | | | |
| | | | | | KIAA0553 [H. sapiens] | | | |
| 59 | 2.4 | 2.9 | 2.3 | 2.9 | cytochrome P450, subfamily | Nature 377: 3-174(1995) | 208 | 708 |
| | | | | | IIS. polypeptide 1 | | | |
| 60 | 6.5 | 8.4 | 14.8 | | | | 209 | 709 |
| 61 | | 3.5 | 2.2 | 1.7 | c-myc promoter-binding | Unpublished | 210 | — |
| | | | | | protein | | | |
| 62 | | | 6.8 | | ubiquitin specific protease | J. Biol. Chem. 275: 8880- | 211 | 710 |
| | | | | | 18 | 8888 (2000) | | |
| 63 | 7.3 | 11 | 34.5 | | cytokine inducible SH2- | Unpublished: - (1997) | 212 | 711 |
| | | | | | containing protein | | | |
| 64 | 2.4 | 2.4 | 2.4 | 1.8 | EH-domain containing 3 | Genomics 63: 255-262 (2000) | 213 | 712 |
| 65 | | | 2.2 | | peptidylprolyl isomerase | Unpublished | 214 | — |
| | | | | | (cyclophilin)-like 3 | | | |
| 66 | 4.4 | 2.1 | 2.2 | 7 | type 1 intermediate filament | Unpublished: - (2002) | 215 | 713 |
| | | | | | cytokeratin | | | |

[0416] TABLE 15

| | | | | | | | | | | lot 1 | |
|---|---|---|---|---|---|---|---|---|---|---|---|
| | Cat_{—} | | | | | | | gene | map | Day 3 | |
| | tag | category | Probe ID | Chip | accession | RefSeq | RefSeq | symbol | location | AI | IMM |
| 67 | 26 | transcription factor | 43350_f_at | HG-U95B | AI968310 | NM_001572 | NP_001563 | IRF7 | 11p15.5 | 6.8 | 5 |
| | | | | | | NM_004029 | NP_004020 | | | | |
| | | | | | | NM_004030 | NP_004021 | | | | |
| | | | | | | NM_004031 | NP_004022 | | | | |
| 68 | 26 | transcription factor | 48587_at | HG-U95B | AI290876 | NM_004235 | NP_004226 | KLF4 | 9q31 | 2.5 | |
| 69 | | | 42302_at | HG-U95B | AI082042 | | | | | 6.3 | 2.4 |
| 70 | | | 42721_at | HG-U95B | AI261490 | | | | | 5.6 | |
| 71 | | | 43438_at | HG-U95B | AI694413 | | | | | 4.4 | 9.1 |
| 72 | | | 45608_at | HG-U95B | AI202327 | | | | | 2.1 | 2.1 |
| 73 | | | 46120_at | HG-U95B | AA149250 | | | | | 3.5 | 7.5 |
| 74 | | | 46378_at | HG-U95B | AA019557 | | | | | 2.1 | |
| 75 | | | 47252_at | HG-U95B | W73994 | | | | | 3.2 | |
| 76 | | | 47390_at | HG-U95B | AA928060 | | | | | | |
| 77 | | | 51024_at | HG-U95B | AI400509 | | | | | 3.7 | 2.4 |
| 78 | | | 54922_at | HG-U95B | AI118798 | | | | | 2.4 | 2.1 |
| 79 | | | 55491_at | HG-U95B | AI081571 | | | | | 3 | 2.3 |

| | lot 1 | | lot 2 | | | | SEQ ID NO: | SEQ ID NO: |
|---|---|---|---|---|---|---|---|---|
| | Day 7 | | Day 3 | Day 7 | | | (nucleotide | (amino acid |
| | AI | IMM | AI | AI | title | reference | seq.) | seq.) |
| 67 | | | 4 | 3.8 | interferon regulatory factor 7 | Mol. Cell. Biol. 17: 5748-5757 | 216, 217, | 714, 715, |
| | | | | | | (1997) | 218, 219 | 716, 717 |
| 68 | | 2.7 | 2.5 | 1.7 | Kruppel-like factor 4 (gut) | J Biol Chem 1998 Jan | 220 | 718 |
| | | | | | | 9: 273(2): 1026-31 | | |
| 69 | 5.7 | 3.2 | 4.8 | 4.6 | ESTs | Unpublished | 221 | — |
| 70 | 6.9 | 4.8 | 5.9 | 3.6 | ESTs | Unpublished | 222 | — |
| 71 | 6.8 | 8 | 8.9 | 3 | olfactory receptor, family 2, | Unpublished | 223 | — |
| | | | | | subfamily I, member 6 | | | |
| 72 | | | 2.8 | 2.1 | ESTs | Unpublished | 224 | — |
| 73 | 5.4 | 12.9 | 7.6 | | ESTs | Unpublished | 225 | — |
| 74 | | | 2.4 | | ESTs | Unpublished | 226 | — |
| 75 | | | 2.3 | 3.7 | | Unpublished | 227 | — |
| 76 | 2.9 | 5.1 | | 3 | ESTs | Unpublished | 228 | — |
| 77 | | | 2.2 | | ESTs | Unpublished | 229 | — |
| 78 | | | 2.2 | | ESTs | Unpublished | 230 | — |
| 79 | | 2.3 | 2.2 | 4.9 | ESTs | Unpublished | 231 | — |

[0417] TABLE 16

| | | | |
|---|---|---|---|
| | | | lot 1 |
| Cat_{—} | gene | map | Day 3 |

| | tag | category | Probe ID | Chip | accession | RefSeq | RefSeq | symbol | location | AI | IMM | |
|---|---|---|---|---|---|---|---|---|---|---|---|---|
| 1 | 3 | cell cycles | 43347_at | HG-U95C | AA745981 | NM_006403 | NP_006394 | HEF1 | 6p25-p24 | 4.4 | 3 | |
| 2 | 5 | cytokine | 48656_at | HG-U95C | AI393886 | NM_030968 | NP_112230 | ZSIG37 | 17q25.2 | 11 | 5.7 | |
| | | related | | | | | | | | | | |
| 3 | 7 | enzyme | 62213_at | HG-U95C | AA166620 | NM_032211 | NP_115587 | LOXL4 | 10q24 | 38.5 | 21.9 | |
| 4 | 8 | hypothetical | 49146_at | HG-U95C | AA305101 | | | DKFZP564I1171 | 5p1533 | | | |
| | | protein | | | | | | | | | | |
| 5 | 8 | hypothetical | 53497_at | HG-U95C | AI129512 | | | | | | | |
| | | protein | | | | | | | | | | |
| 6 | 8 | hypothetical | 56608_at | HG-U95C | AW007800 | | | KIAA0592 | 10q11.21 | 2.4 | | |
| | | protein | | | | | | | | | | |
| 7 | 8 | hypothetical | 60001_at | HG-U95C | AA405241 | NM_025054 | NP_079330 | FLJ23132 | 8q13 | | | |
| | | protein | | | | | | | | | | |
| 8 | 8 | hypothetical | 60049_at | HG-U95C | AI936345 | NM_019027 | NP_061900 | FLJ20273 | 4p13-p12 | 3 | | |
| | | protein | | | | | | | | | | |
| 9 | 8 | hypothetical | 63780_at | HG-U95C | AA814195 | NM_018370 | NP_060840 | FLJ11259 | 12q23.3 | 2.2 | | |
| | | protein | | | | | | | | | | |
| 10 | 8 | hypothetical | 63794_at | HG-U95C | AA150460 | | | KIAA1404 | 20q13.13 | 5.7 | | |
| | | protein | | | | | | | | | | |
| 11 | 8 | hypothetical | 65191_at | HG-U95C | AI380703 | | | KIAA1268 | 3q21.1 | 5.9 | 2.3 | |
| | | protein | | | | | | | | | | |
| 12 | 9 | interferon- | 62130_at | HG-U95C | AA651720 | NM_022147 | NP_071430 | IFRG28 | 3q26.2 | 3.7 | 5.8 | |
| | | inducible | | | | | | | | | | |
| | | protein | | | | | | | | | | |
| 13 | 12 | membrane | 48799_at | HG-U95C | AI569988 | NM_015392 | NP_056207 | NPDC1 | 9q34.3 | 2 | | |
| | | protein | | | | | | | | | | |
| 14 | 12 | membrane | 51776_s_at | HG-U95C | AI749525 | NM_005764 | NP_005755 | DD96 | 1p32.3 | 9.6 | 12.6 | |
| | | protein | | | | | | | | | | |
| 14 | 12 | membrane | protein | 59794_g_at | HG-U95C | AA872415 | NM_005764 | NP_005755 | DD96 | 1p32.3 | 6.8 | 11.9 |
| | | protein | | | | | | | | | | |
| 15 | 14 | MHC | 57280_f_at | HG-U95C | AI985880 | NM_005514 | NP_005505 | HLA-B | 6p21.3 | | | |
| 16 | 16 | oncogenesis | 65963_at | HG-U95C | W72043 | | | D2S44B | 2pter-p25.1 | 4.1 | | |
| 17 | 17 | others | 61871_r_at | HG-U95C | AI963349 | NM_021818 | NP_068590 | WW45 | 14q13-q23 | 2.3 | | |
| 17 | 17 | others | 65587_at | HG-U95C | AI307256 | NM_021818 | NP_068590 | WW45 | 14q13-q23 | 4.8 | | |
| 18 | 17 | others | 64368_s_at | HG-U95C | AW001184 | NM_018103 | NP_060573 | LRRC5 | 1p22.2 | 2.4 | | |
| 19 | 17 | others | 64714_at | HG-U95C | AI828075 | NM_003548 | NP_003539 | H4F2 | 1q21 | | | |
| 20 | 17 | others | 65706_at | HG-U95C | Z78342 | NM_014028 | NP_054747 | HSPC019 | 6q21 | | | |
| 21 | 21 | proteinase | 63329_at | HG-U95C | AI826806 | NM_005656 | NP_005647 | TMPRSS2 | 21q22.3 | 2.4 | | |
| 22 | 21 | proteinase | 63866_at | HG-U95C | AI246687 | NM_001814 | NP_001805 | CTSC | 11q14.1- | 6.2 | 6.2 | |
| | | | | | | | | | q14.3 | | | |
| 23 | 24 | signal | 63332_at | HG-U95C | AA127696 | NM_014143 | NP_054862 | B7-H1 | 9p24 | 6 | | |
| | | transduction | | | | | | | | | | |
| 24 | 25 | structural | 48684_at | HG-U95C | AI961431 | NM_015515 | NP_056330 | HAIK1 | 17q21.1 | 3.2 | 2.2 | |
| | | protein | | | | | | | | | | |
| 25 | 25 | structural | 57654_s_at | HG-U95C | AI651213 | MM_018984 | NP_061857 | KIAA1298 | 12q24.11 | 2.2 | | |
| | | protein | | | | | | | | | | |
| 26 | | | 60246_at | HG-U95C | AA676810 | | | | | 4.5 | 6.6 | |
| 27 | | | 62330_at | HG-U95C | AI075407 | | | | | 28.4 | 14.5 | |
| 28 | | | 62828_at | HG-U95C | AI245238 | | | | | 3.4 | 3.1 | |
| 29 | | | 65457_at | HG-U95C | AW021108 | | | | | 2.5 | 4.5 | |
| 30 | | | 56392_at | HG-U95C | AA743820 | | | | | 17.1 | 23.5 | |
| 31 | | | 66899_at | HG-U950 | AI733062 | | | | | | | |

| | lot 1 | | lot 2 | | | | SEQ ID NO: | SEQ ID NO: |
|---|---|---|---|---|---|---|---|---|
| | Day 7 | | Day 3 | Day 7 | | | (nucleotide | (amino acid |
| | AI | IMM | AI | AI | title | reference | seq.) | seq.) |
| 1 | 7.6 | | | 11.3 | enhancer of filamentation 1 | Mol Cell Biol. 1996 | 232 | 719 |
| | | | | | (cas-like docking Crk- | Jul; 16(7): 3327 37 | | |
| | | | | | associated substrate related) | | | |
| 2 | 11.4 | 7.9 | 4.4 | | G protein coupled receptor | unpublished | 233 | 720 |
| | | | | | interacting protein, | | | |
| | | | | | complement-c1q tumor | | | |
| | | | | | necrosis factor-related | | | |
| 3 | 8.6 | 6.1 | 7.6 | 15.4 | lysyl oxidase-like 4/FLJ21889 | Unpublished: - (2001) | 234 | 721 |
| 4 | 11 | 8.9 | 11.3 | 4 | DKFZP564I1171 protein | Nature 377 (6547 Suppl): 3- | 235 | — |
| | | | | | | 174 1995 | | |
| 5 | 2.2 | | 2.2 | 4.1 | integrin, beta 8 | Unpublished | 236 | — |
| 6 | 9.3 | 5.7 | 10.6 | 3.3 | endogenous retroviral protease | Unpublished | 237 | — |
| 7 | 2.4 | | | 3.2 | hypothetical protein FLJ23132 | unpublished | 238 | 722 |
| 8 | | | 2.1 | 3.1 | hypothetical protein | unpublished | 239 | 723 |
| 9 | 2.7 | | 2 | | hypothetical protein FIJ11259 | unpublished | 240 | 724 |
| 10 | | 5.7 | 3.9 | 2.2 | KIAA1404 protein | Genome Res. 6 (9): 807-28 | 241 | — |
| | | | | | | 1996 | | |
| 11 | 3 | | 2.7 | | KIAA1268 protein | Unpublished | 242 | — |
| 12 | 3 | 4.5 | 8 | | 28 kD interferon responsive | Unpublished: - | 243 | 725 |
| | | | | | protein | | | |
| 13 | 2.7 | | 2.1 | 2 | neural proliferation | EMBO J. 19: 4806-4816 (2000) | 244 | 726 |
| | | | | | differentiation and control, 1 | | | |
| 14 | 3.8 | 7.7 | 4.5 | 3.1 | epithelial protein up-regulated | Clin. Cancer Res. 1: 1209-1215 | 245 | 727 |
| | | | | | in carcinoma, membrane | (1995) | | |
| | | | | | associated protein 17 | | | |
| 14 | 2.6 | 5.5 | 5.2 | 2.6 | epithelial protein up-regulated | Clin. Cancer Res. 1: 1209-1215 | 245 | 727 |
| | | | | | in carcinoma, membrane | (1995) | | |
| | | | | | associated protein 17 | | | |
| 15 | 2.3 | | | | major histocompatibility | Proc. Natl. Acad. Sci. U.S.A. | 246 | 728 |
| | | | | | complex, class I,B | 84 7237-7241 (1987) | | |
| 16 | | | 3.1 | 4.8 | Melanoma associated gene | Unpublished | 247 | — |
| 17 | 2.7 | | 2.5 | 3.3 | WW Domain-Containing Gene | Biochem. Biophys. Res. | 248 | 729 |
| | | | | | | Commun. 276: 990-998 (2000) | | |
| 17 | | | 2.2 | 4 | WW Domain-Containing Gene | Biochem. Biophys. | 248 | 729 |
| | | | | | | Res. Commun. 276: 990- | | |
| | | | | | | 998 (2000) | | |
| 18 | | 2.8 | 2.1 | | leucine-rich repeat-containing | Unpublished: - ( ) | 249 | 730 |
| | | | | | 5 | | | |
| 19 | 3.1 | | | 4.3 | H4 histone, family 2 | Science 226: 838-840 (1984) | 250 | 731 |
| 20 | 3.3 | 4.3 | 2.3 | 3.1 | HSPC019 protein | Unpublished: - ( ) | 251 | 732 |
| 21 | | 2.8 | 2 | | transmembrane protease, | Genomics 44: 309-320 (1997) | 252 | 733 |
| | | | | | serine 2 | | | |
| 22 | 3.6 | 9 | 7.6 | 2.5 | | | 253 | 734 |
| 23 | 6 | 9 | 8.2 | | ESTs | Nat. Med. 5: 1365-1369 (1999) | 254 | 735 |
| 24 | 4.4 | 2.1 | 2.2 | 7 | type I intermediate | Unpublished | 255 | 736 |
| | | | | | filament cytokeratin | | | |
| 25 | | | 6.3 | | KIAA1298 protein | DNA Res. 7: 65-73 (2000) | 256 | 737 |
| 26 | | | 4.7 | | Homo sapiens, clone | Unpublished | 257 | — |
| | | | | | IMAGE: 4428577 mRNA, partial | | | |
| | | | | | cds | | | |
| 27 | | | 11.3 | 3.3 | ESTs | Unpublished | 258 | — |
| 28 | 9.6 | 4.4 | 1.1 | | ESTs | Unpublished | 259 | — |
| 29 | 6.8 | 3.5 | 3.5 | | ESTs | Genomics 23: 42-50 1994 | 260 | — |
| 30 | 38.9 | 33.2 | 22.9 | 11.6 | ESTs | Unpublished | 261 | — |
| 31 | 3.5 | | | 2.6 | ESTs | Unpublished | 262 | — |

[0418] TABLE 17

| | | | | | | | | | | lot 1 | |
|---|---|---|---|---|---|---|---|---|---|---|---|
| | Cat_{—} | | | | | | | gene | map | Day 3 | |
| | tag | category | Probe ID | Chip | accession | RefSeq | RefSeq | symbol | location | AI | IMM |
| 1 | 7 | enzyme | 75024_at | HG-U95D | R49062 | NM_001111, | NP_001102, | ADAR | 1q21.1-q21.2 | 2.8 | |
| | | | | | | NM_015840, | NP_056655, | | | | |
| | | | | | | NM_015841 | NP_056656 | | | | |
| 2 | 7 | enzyme | 79337_at | HG-U95D | AA687477 | NM_014080 | NP_054799 | DUOX2 | 15q15.3-q21 | | 2.2 |
| 3 | 7 | enzyme | 81966_at | HG-U95D | AI199418 | NM_021105 | NP_066928 | PLSCR1 | 3q23 | 3.3 | |
| 4 | 8 | hypothetical | 75423_at | HG-U95D | AI245770 | | | | | 2.1 | |
| | | protein | | | | | | | | | |
| 5 | 8 | hypothetical | 75857_at | HG-U95D | W80832 | | | | | 3.6 | 3.2 |
| | | protein | | | | | | | | | |
| 6 | 8 | hypothetical | 82008_at | HG-U95D | AA199927 | | | | | | |
| | | protein | | | | | | | | | |
| 7 | 8 | hypothetical | 91851_at | HG-U95D | AI051434 | | | | | 3.5 | |
| | | protein | | | | | | | | | |
| 8 | 24 | signal | 89899_at | HG-U95D | AW001846 | NM_002463 | NP_002454 | MX2 | 21q22.3 | 9.8 | 9.8 |
| | | transduction | | | | | | | | | |
| 9 | | | 71157_at | HG-U95D | AI889178 | | | | | 4.4 | 4 |
| 10 | | | 74908_at | HG-U95D | AW026462 | | | | | 4.3 | |
| 11 | | | 75000_at | HG-U95D | AI735440 | | | | | | |
| 12 | | | 80077_at | HG-U95D | AI765608 | | | | | 3 | |
| 13 | | | 80876_at | HG-U95D | AA513406 | | | | | 2.2 | |

| | lot 1 | | lot 2 | | | | SEQ ID NO: | SEQ ID NO: |
|---|---|---|---|---|---|---|---|---|
| | Day 7 | | Day 3 | Day 7 | | | (nucleotide | (amino acid |
| | AI | IMM | AI | AI | title | reference | seq.) | seq.) |
| 1 | | | 2 | | adenosine deaminase, RNA- | Proc. Natl. Acad. Sci. U.S.A. | 263, 264, 265 | 738, 739, 740 |
| | | | | | specific, ADAR isoform a-c | 91: 11457-11461 (1994) | | |
| 2 | 2.6 | 5.7 | | 2.5 | dual oxidase 2 | Unpublished: - (2000) | 266 | 741 |
| 3 | | | 3.3 | | phospholipid scramblase 1 | J. Biol. Chem. 272 (29), | 267 | 742 |
| | | | | | | 18240-18244 (1997) | | |
| 4 | | | 2.2 | 2.8 | Homo sapiens mRNA; cDNA | | 268 | — |
| | | | | | DKFZp564N1164 (from clone | | | |
| | | | | | DKFZp564N1164) | | | |
| 5 | 3.4 | 4.3 | 3.1 | 2.5 | Homo sapiens cDNA FLJ32334 | | 269 | — |
| | | | | | fis, clone PROST2005426 | | | |
| 6 | 2.1 | | 11.7 | 4.2 | Homo sapiens cDNA: FLJ21270 | | 270 | — |
| | | | | | fis, clone COL01749 | | | |
| 7 | | 2.1 | 2.3 | | Homo sapiens cDNA FLJ12136 | | 271 | — |
| | | | | | fis, clone MAMMA 1000312 | | | |
| 8 | | | 3.2 | | myxovirus (influenza) resistance | Mol. Cell. Biol. 9: 5062- | 272 | 743 |
| | | | | | 2, homolog of murine | 5072(1989) | | |
| 9 | 3.5 | 5.9 | 3.8 | | ESTs | | 273 | — |
| 10 | | | 8.5 | | ESTs | | 274 | — |
| 11 | 2.6 | | | 4.4 | | | 275 | — |
| 12 | 3.9 | | 7.7 | | ESTs | | 276 | — |
| 13 | | 3.7 | 2.1 | | ESTs | | 277 | — |

[0419] TABLE 18

| | | | | | | | | | | lot 1 | |
|---|---|---|---|---|---|---|---|---|---|---|---|
| | Cat_{—} | | | | | | | gene | map | Day 3 | |
| | tag | category | Probe ID | Chip | accession | RefSeq | RefSeq | symbol | location | AI | IMM |
| 1 | 2 | cell adhesion | 90421_at | HG-U95E | AA633203 | NM_033255 | NP_150280 | EPSTI1 | 3q13.3 | 7.2 | 9.9 |
| 2 | 4 | chemokine | 90189_at | HG-U95E | AI928371 | NM_006072 | NP_006063 | SCYA26 | 7q11.2 | 26.3 | 18.1 |
| 3 | 7 | enzyme | 72962_at | HG-U95E | AA705851 | NM_005504 | NP_005495 | BCAT1 | 2p12.1 | | |
| 4 | 7 | enzyme | 77749_at | HG-U95E | AI860936 | NM_014314 | NP_055129 | RIG-1 | 9p12 | | 3.9 |
| 5 | 7 | enzyme | 77751_at | HG-U95E | AI587061 | NM_004751 | NP_004742 | GCNT3 | 5q21.3 | 4.9 | 10.2 |
| 6 | 7 | enzyme | 90662_at | HG-U95E | AI340262 | NM_002535, | NP_002526, | OAS2 | 2q24.2 | | |
| | | | | | | NM_016817 | NP_058197 | | | | |
| 7 | 8 | hypothetical | 67329_at | HG-U95E | AA610377 | NM_022837 | NP_073748 | FLJ22833 | | 3.1 | |
| | | protein | | | | | | | | | |
| 8 | 8 | hypothetical | 68562_at | HG-U95E | AA779704 | | | | | | |
| | | protein | | | | | | | | | |
| 9 | 8 | hypothetical | 72867_at | HG-U95E | AW024819 | | | | | | 4.2 |
| | | protein | | | | | | | | | |
| 10 | 8 | hypothetical | 72960_s_at | HG-U95E | AA199856 | | | | | 4.3 | 5.8 |
| | | protein | | | | | | | | | |
| 11 | 8 | hypothetical | 77546_at | HG-U95E | AI859144 | | | | | 4.2 | 6.1 |
| | | protein | | | | | | | | | |
| 12 | 8 | hypothetical | 80826_at | HG-U95E | AA806114 | | | | | | |
| | | protein | | | | | | | | | |
| 13 | 8 | hypothetical | 83376_at | HG-U95E | AI816914 | NM_017742 | NP_060212 | FLJ20281 | 18q21.32 | | |
| | | protein | | | | | | | | | |
| 14 | 8 | hypothetical | 83541_at | HG-U95E | AI343912 | NM_018263 | NP_060733 | KIAA1685 | 2p24.1 | | |
| | | protein | | | | | | | | | |
| 15 | 8 | hypothetical | 89255_at | HG-U95E | AI803648 | | | | | | |
| | | protein | | | | | | | | | |
| 16 | 8 | hypothetical | 89834_at | HG-U95E | AI984061 | | | | | | |
| | | protein | | | | | | | | | |
| 17 | 8 | hypothetical | 89902_at | HG-U95E | AI492878 | NM_024738 | NP_079014 | FLJ21415 | 12q24.21 | | |
| | | protein | | | | | | | | | |
| 18 | 8 | hypothetical | 91420_at | HG-U95E | AA558752 | NM_023080 | NP_075568 | FLJ20989 | | 14.8 | 13.5 |
| | | protein | | | | | | | | | |
| 19 | 9 | interferon-inducible | 84893_at | HG-U95E | AI446I68 | NM_080657 | NP_542388 | vipirin | 2p25.3 | | |
| | | protein | | | | | | | | | |
| 20 | 12 | membrane protein | 77660_at | HG-U95E | AI889132 | NM_021101 | NP_066924 | CLDN1 | 3q28-q29 | | |
| 21 | 12 | membrane protein | 86507_at | HG-U95E | A1832218 | NM_031308 | NP_112598 | EPPK1 | | | |
| 22 | 16 | oncogenesis | 69619_at | HG-U95E | AI670955 | NM_031458 | NP_113646 | BAL | 3q13 | 3.5 | 3.1 |
| 23 | 16 | oncogenesis | 87816_g_at | HG-U95E | AI979308 | NM_004225 | NP_004216 | MFHAS1 | 8p23.1 | 3 | |
| 23 | 16 | oncogenesis | 89651_at | HG-U95E | AW003551 | NM_004225 | NP_004216 | MASL1 | 8p23.1 | | |
| 24 | 17 | others | 80675_at | HG-U95E | AI990026 | NM_000968 | NP_000959 | RPL4 | 15q22 | 2.2 | |
| 25 | 17 | others | 8S090_at | HG-U95E | AI554809 | NM_012153 | NP_036285 | EHF | 11p12 | 2.3 | |

| | lot 1 | | lot 2 | | | | SEQ ID NO: | SEQ ID NO: |
|---|---|---|---|---|---|---|---|---|
| | Day 7 | | Day 3 | Day 7 | | | (nucleotide | (amino acid |
| | AI | IMM | AI | AI | title | reference | seq.) | seq.) |
| 1 | | 3.4 | 9.4 | | epithelial stromal interaction I | Unpublished: - ( ) | 278 | 744 |
| | | | | | (breast) | | | |
| 2 | 30.4 | 35.1 | 16.7 | 29.8 | small inducible cytokine | J. Exp. Mod. 185: 1163- | 279 | 745 |
| | | | | | subfamily A (Cys—Cys), member | 1172 (1997) | | |
| | | | | | 26 (eotaxin-3) | | | |
| 3 | 2.7 | 3.4 | 10.5 | 3.7 | Homo sapiens cDNA: FLJ21270 | | 280 | 746 |
| | | | | | fis, clone COL01749/branched | | | |
| | | | | | chain aminotransferase 1, | | | |
| | | | | | cytosolic | | | |
| 4 | 3.4 | 5.1 | 6.4 | 2.3 | RNA helicase | Thesis: - (1997) | 281 | 747 |
| 5 | 2.5 | 3.5 | | 2 | glucosaminyl (N-acetyl) | J. Biol. Chem. 274: 3215- | 282 | 748 |
| | | | | | transferase 3, mucin type | 3221 (1999) | | |
| 6 | | | 4.1 | | 2′-5′ oligoadenylate synthetase | EMBO J. 6: 1273-1280 | 283, 284 | 749, 750 |
| | | | | | 2, isoform p69, isoform p71 | (1987) | | |
| 7 | 3.6 | 3.7 | 6.1 | 4.2 | hypothetical protein FLJ22833 | Unpublished: - ( ) | 285 | 751 |
| 8 | | | 2.8 | | Homo sapiens cDNA FLJ12136 | | 286 | — |
| | | | | | fis, clone MAMMA1000312 | | | |
| 9 | 2.6 | | | 2.3 | Homo sapiens mRNA; cDNA | | 287 | — |
| | | | | | DKFZp434G227 (from clone | | | |
| | | | | | DKFZp434G227) | | | |
| 10 | 3.9 | 3.8 | 18.8 | 5.5 | Homo sapiens cDNA: FLJ21270 | | 288 | — |
| | | | | | fis, clone COL01749 | | | |
| 11 | 2.6 | | 5.5 | 9.8 | KIAA1127 | DNA Res. 6 (5), 329-336 | 289 | — |
| | | | | | | (1999) | | |
| 12 | 5.3 | 5.3 | 7.2 | 2 | Homo sapiens cDNA FLJ25184 | | 290 | — |
| | | | | | fis, clone CBR09423 | | | |
| 13 | 2.1 | | | 2.6 | hypothetical protein FLJ20281 | DNA Res. 7: 347-355 (2000) | 291 | 752 |
| 14 | 2.6 | | | 2 | KIAA1685 protein | Unpublished: - ( ) | 292 | 753 |
| 15 | 3.5 | 7 | | 2.4 | Homo sapiens cDNA FLJ11576 | | 293 | — |
| | | | | | fis, clone HEMBA1003548 | | | |
| 16 | 2.7 | | | 3.1 | ESTs, Weakly similar to T22914 | | 294 | — |
| | | | | | hypothetical protein F58E10.4 - | | | |
| | | | | | Caenorhabditis elegans | | | |
| | | | | | [C. elegans] | | | |
| 17 | 3.4 | | | 2.7 | hypothetical protein FLJ21415 | Unpublished: - (2000) | 295 | 754 |
| 18 | 3.4 | | | 2.1 | hypothetical protein FLJ20989 | Unpublished: - ( ) | 296 | 755 |
| 19 | 2.7 | 6.6 | 15.4 | | Homo sapiens vipirin (cig5). | Unpublished: - (2001) | 297 | 756 |
| | | | | | mRNA. | | | |
| 20 | 2.6 | | | 5.4 | | | 298 | 757 |
| 21 | 2.6 | 3.6 | | 3.2 | epiplakin 1 | J. Biol. Chem. 276: 13340- | 299 | 758 |
| | | | | | | 13347 (2001) | | |
| 22 | | 2.2 | 3.1 | 2.4 | B aggressive lymphoma gene | Blood 96: 4328-4334(2000) | 300 | 759 |
| 23 | 3.4 | 3.1 | 3.5 | 2.7 | malignant fibrous histiocytoma | Cancer Res. 59: 511-515 | 301 | 760 |
| | | | | | amplified sequence 1 | (1999) | | |
| 23 | 4.3 | | 3.2 | 4.2 | MFH-amplified sequences with | Cancer Res. 59: 511-515 | 301 | 760 |
| | | | | | leucine-rich tandem repeats 1 | (1999) | | |
| | | | | | (MASL1) | | | |
| 24 | | | 2.3 | | ribosomal protein L4 | Biochim. Biophys. | 302 | 761 |
| | | | | | | Acta. 1216: 475-478 (1993) | | |
| 25 | | | 3.3 | 3 | ets homologous factor | Biochem. Biophys. | 303 | 762 |
| | | | | | | Res. Commun. 264: 119-126 | | |
| | | | | | | (1999) | | |

[0420] TABLE 19

| | | | | | | | | | | | |
|---|---|---|---|---|---|---|---|---|---|---|---|
| 25 | 17 | others | 85092_g_at | HG-U95E | AI554809 | NM_012153 | NP_036285 | EHF | 11p12 | | 2.3 |
| 26 | 17 | others | 89320_at | HG-U95E | AA308288 | NM_032390 | NP_115766 | NIFK | 2q14.2 | | |
| 27 | 20 | protein binding | 89338_at | HG-U95E | AA102335 | NM_025151 | NP_079427 | rab11-FIP1 | 8p11.22 | | |
| | | protein | | | | | | | | | |
| 28 | 24 | signal transduction | 87125_at | HG-U95E | AI925166 | NM_024665 | NP_078941 | TBLR1 | 3q23 | 2.8 | |
| 29 | 27 | transporter | 34759_at | HG-U95E | U68494 | NM_005628 | NP_005619 | SLC1A5 | 19q13.3 | | |
| 30 | 27 | transporter | 87860_s_at | HG-U95E | AW016409 | NM_016354 | NP_057438 | SLC21A12 | 1q43 | 2.7 | |
| 31 | 27 | transporter | 88617_at | HG-U95E | N21319 | NM_012434 | NP_036566 | SLC17A5 | 6q14-q15 | | |
| 32 | | | 67357_at | HG-U95E | H70665 | | | | | 2.6 | |

| | | | | | | | |
|---|---|---|---|---|---|---|---|
| 25 | 2.1 | 3.3 | 7 | ets homologous factor | Biochem. Biophys. | 303 | 762 |
| | | | | | Res. Commun. 264: 119-126 | | |
| | | | | | (1999) | | |
| 26 | 2.9 | 2.1 | 3.4 | nucleolar protein interacting | J. Biol. Chem 276: 25386- | 304 | 763 |
| | | | | with the FHA domain of pKi-67 | 25391 (2001) | | |
| 27 | 4.4 | | 14.6 | Rab effector protein; Rab- | J .Biol. Chem. 276: 39067- | 305 | 764 |
| | | | | interacting recycling | 39075 (2001) | | |
| | | | | protein:rab11-family interacting | | | |
| | | | | protein 1 | | | |
| 28 | | 4.4 | | nuclear receptor co- | Exp. Hematol. 28: 1286-1296 | 306 | 765 |
| | | | | repressor/HDAC3 complex | (2000) | | |
| | | | | subunit | | | |
| 29 | 2.5 | | 2.9 | hbc647 mRNA | J. Virol.: 73, 4470-4474 | 307 | 766 |
| | | | | sequence(SOLUTE CARRIER | (1999) | | |
| | | | | FAMILY 1 (NEUTRAL AMINO | | | |
| | | | | ACID TRANSPORTER), | | | |
| | | | | MEMBER 5) | | | |
| 30 | 2.7 | | 2.8 | solute carrier family 21 (organic | Unpublished: - (2001) | 308 | 767 |
| | | | | anion transporter), member 12 | | | |
| 31 | 2.7 | | 2.3 | solute carrier family 17 | Nat. Genet. 23: 462-465 | 309 | 768 |
| | | | | (anion/sugar transporter), | (1999) | | |
| | | | | member 5 | | | |
| 32 | | 2.1 | | discs, large (Drosophila) | | 310 | — |
| | | | | homolog 1 | | | |

[0421] TABLE 20

| | | | | | | | | | | lot 1 | |
|---|---|---|---|---|---|---|---|---|---|---|---|
| | Cat_{—} | | | | | | | gene | map | Day 3 | |
| | tag | category | Probe ID | Chip | accession | RefSeq | RefSeq | symbol | location | AI | IMM |
| 1 | 1 | apoptosis | 33412_at | HG-U95A | AI535946 | NM_002305 | NP_002296 | LGALS1 | 22q13.1 | −2 | |
| 2 | 2 | cell adhesion | 33693_at | HG-U95A | M76482 | NM_001944 | NP_001935 | DSG3 | 18q12.1- | | |
| | | | | | | | | | q12.2 | | |
| 3 | 2 | cell adhesion | 34193_at | HG-U95A | AF002246 | NM_006614 | NP_006605 | CHL1 | 3p26 | −2.5 | |
| 4 | 2 | cell adhesion | 36284_at | HG-U95A | Y12642 | NM_003695 | NP_003686 | E48 | 8q24-qter | −10.3 | |
| 5 | 2 | cell adhesion | 38112_g_at | HG-U95A | X15998 | NM_004385 | NP_004376 | CSPG2 | 5q14.3 | | |
| 6 | 2 | cell adhesion | 38127_at | HG-U95A | Z48199 | NM_002997 | NP_002988 | SDC1 | 2p24.1 | −2.2 | |
| 7 | 2 | cell adhesion | 39579_at | HG-U95A | U89916 | NM_006984 | NP_008915 | CLDN10 | 13q31-q34 | | −2.3 |
| 8 | 4 | chemokine | 823_at | HG-U95A | U84487 | NM_002996 | NP_002987 | SCYD1 | 16q13 | −2.2 | |
| 9 | 5 | cytokine | 1385_at | HG-U95A | M77349 | NM_000358 | NP_000349 | TGFBI | 5q31 | −3.8 | −2.2 |
| | | related | | | | | | | | | |
| 10 | 5 | cytokine | 38631_at | HG-U95A | M92357 | NM_006291 | NP_006282 | TNFAIP2 | 14q32 | | |
| | | related | | | | | | | | | |
| 11 | 6 | cytosolic | 35275_at | HG-U95A | AL050025 | NM_001128 | NP_001119 | AP1G1 | 16q23 | −3.6 | −2.8 |
| | | protein | | | | | | | | | |
| 12 | 6 | cytosolic | 40508_at | HG-U95A | AF025887 | NM_001512 | NP_001503 | GSTA4 | 6p12 | −8 | |
| | | protein | | | | | | | | | |

| | lot 1 | | lot 2 | | | | SEQ ID NO: | SEQ ID NO: |
|---|---|---|---|---|---|---|---|---|
| | Day 7 | | Day 3 | Day 7 | | | (nucleotide | (amino acid |
| | AI | IMM | AI | AI | title | reference | seq.) | seq.) |
| 1 | −6.8 | | −2.6 | −6.2 | beta-galactosidase | Proc. Natl. Acad. Sci. U.S.A. | 311 | 769 |
| | | | | | binding lectin precursor | 83: 7603-7607 (1986) | | |
| 2 | −3.6 | | | −2.2 | desmoglein 3 | Cell 67: 869-877 (1991) | 312 | 770 |
| | | | | | preproprotein | | | |
| 3 | | 2.1 | −4.3 | −7.3 | cell adhesion molecule | Hum. Genet. 103: 355-364 | 313 | 771 |
| | | | | | with homology to L1CAM | (1998) | | |
| | | | | | (close homologue of L1) | | | |
| 4 | −7.2 | | −3.8 | −5.6 | lymphocyte antigen 6 | J. Cell Biol. 129: 1677-1689 | 314 | 772 |
| | | | | | complex, locus D | (1995) | | |
| 5 | −2.1 | | | −2.5 | chondroitin sulfate | J. Biol. Chem. 262: 13120- | 315 | 773 |
| | | | | | proteoglycan 2 (versican) | 13125 (1987) | | |
| 6 | −2 2 | | | −2.9 | syndecan 1 | J. Biol. Chem. 265: 6884- | 316 | 774 |
| | | | | | | 6889 (1990) | | |
| 7 | −4.6 | | −5.4 | −5.4 | claudin 10 | Unpublished | 317 | 775 |
| 8 | −8.5 | | −2.1 | −24.6 | small inducible cytokine | Nature 385: 640-644 (1997) | 318 | 776 |
| | | | | | subfamily D (Cys-X3- | | | |
| | | | | | Cys). member 1 | | | |
| | | | | | (fractalkine, neurotactin) | | | |
| 9 | −5.3 | −3 | −3.1 | −4.9 | transforming growth | DNA Cell Biol. 11: 511-522 | 319 | 777 |
| | | | | | factor, beta-induced, | (1992) | | |
| | | | | | 68 kD | | | |
| 10 | −4.4 | | −2.4 | −3.7 | tumor necrosis factor, | J. Immunol. 148: 3302-3312 | 320 | 778 |
| | | | | | alpha-induced protein 2 | (1992) | | |
| 11 | −3.9 | −3.7 | −2.8 | −2.6 | adaptor-related protein | Genomics 50: 275-280 | 321 | 779 |
| | | | | | complex 1, gamma 1 | (1998) | | |
| | | | | | subunit | | | |
| 12 | −3.8 | | −2.8 | −5.4 | glutathione S-transferase | Biochem. J. 330: 175-179 | 322 | 780 |
| | | | | | A4 | (1998) | | |

[0422] TABLE 21

| | | | | | | | | | | lot 1 | |
|---|---|---|---|---|---|---|---|---|---|---|---|
| | Cat_{—} | | | | | | | gene | map | Day 3 | |
| | tag | category | Probe ID | Chip | accession | RefSeq | RefSeq | symbol | location | AI | IMM |
| 13 | 7 | enzyme | 32805_at | HG-U95A | U05861 | NM_001353 | NP_001345 | AKR1C1 | 10p15-p14 | −2.7 | |
| 14 | 7 | enzyme | 34637_f_at | HG-U95A | M12963 | NM_000667 | NP_000658 | ADH1A | 4q21-q23 | | −3 |
| 15 | 7 | enzyme | 34935_at | HG-U95A | AL021026 | NM_001460 | NP_001451 | FMO2.3 | 1q23-q25 | −2.2 | |
| 16 | 7 | enzyme | 35947_at | HG-U95A | M98447 | NM_000359 | NP_000350 | HGNC | 14q11.2 | −2 | |
| 17 | 7 | enzyme | 36247_f_at | HG-U95A | M12272 | NM_000669 | NP_000660 | ADH1C | 4q21-q23 | | |
| 18 | 7 | enzyme | 36454_at | HG-U95A | AF037335 | NM_001218 | NP_001209 | CA12 | 15q22 | −4 | −3.5 |
| 19 | 7 | enzyme | 36658_at | HG-U95A | D13643 | NM_014762 | NP_055577 | DHCR24 | 1p33-p31.1 | | |
| 20 | 7 | enzyme | 37215_at | HG-U95A | AF046798 | NM_002863 | NP_002854 | PYGL | 14q21-q22 | −2.2 | |
| 21 | 7 | enzyme | 37415_at | HG-U95A | AB018258 | | BAA34435 | ATP10B | 5q34 | | |
| 22 | 7 | enzyme | 37700_at | HG-U95A | X92106 | NM_000386 | NP_000377 | BLMH | 17q11.2 | | |
| 23 | 7 | enzyme | 37956_at | HG-U95A | U37519 | NM_000695 | NP_000686 | ALDH3B2 | 11q13 | −7.4 | |
| 24 | 7 | enzyme | 38285_at | HG-U95A | AF039397 | NM_001888 | NP_001879 | CRYM | 16p13.11- | | |
| | | | | | | | | | p12.3 | | |
| 25 | 7 | enzyme | 38790_at | HG-U95A | L25879 | NM_000120 | NP_000111 | EPHX1 | 1q42.1 | −3 | |
| 26 | 7 | enzyme | 39008_at | HG-U95A | M13699 | NM_000096 | NP_000087 | CP | 3q23-q25 | | |
| 27 | 7 | enzyme | 39317_at | HG-U95A | D86324 | NM_003570 | NP_003561 | CMAH | 6p22-p23 | −2.2 | |
| 28 | 7 | enzyme | 40082_at | HG-U95A | D10040 | NM_021122 | NP_066945 | FACL2 | 4q34-q35 | | |
| 29 | 7 | enzyme | 40522_at | HG-U95A | X59834 | NM_002065 | NP_002056 | GLUL | 1q31 | −3.8 | −2.9 |
| 30 | 7 | enzyme | 40665_at | HG-U95A | M83772 | NM_006894 | NP_008825 | FMO3 | 1q23-q25 | | |
| 31 | 7 | enzyme | 770_at | HG-U95A | D00632 | NM_002084 | NP_002075 | GPX3 | 5q23 | | −3.2 |
| 32 | 8 | hypothetical | 32215_1_at | HG-U95A | AB020685 | NM_014899 | NP_055714 | KIAA0878 | 5q15 | | |
| | | protein | | | | | | | | | |
| 33 | 8 | hypothetical | 39400_at | HG-U95A | AB028978 | | BAA83007 | KIAA1055 | 15q24.1 | | |
| | | protein | | | | | | | | | |
| 34 | 8 | hypothetical | 39597_at | HG-U95A | AB020650 | NM_014945 | NP_055760 | KIAA0843 | 5q33.1 | −2.2 | −2.3 |
| | | protein | | | | | | | | | |
| 35 | 8 | hypothetical | 40943_at | HG-U95A | AA009569 | NM_024090 | NP_076995 | LCE | 4q25 | | |
| | | protein | | | | | | | | | |

| | lot 1 | | lot 2 | | | | SEQ ID NO: | SEQ ID NO: |
|---|---|---|---|---|---|---|---|---|
| | Day 7 | | Day 3 | Day 7 | | | (nucleotide | (amino acid |
| | AI | IMM | AI | AI | title | reference | seq.) | seq.) |
| 13 | −3.2 | −3.1 | −2.4 | | hepatic dihydrodiol | Biochemistry 1990 Jan | 323 | 781 |
| | | | | | dehydrogenase gene, | 30; 29(4): 1080-7 | | |
| | | | | | exon 9 | | | |
| 14 | −6.1 | | | −20.5 | class I alcohol | Proc. Natl. Acad. Sci. U.S.A. | 324 | 782 |
| | | | | | dehydrogenase, alpha | 83: 634-638 (1986) | | |
| | | | | | subunit | | | |
| 15 | | −2.4 | −3.7 | | dJ127D3.3 (Flavin- | Proc. Natl. Acad. Sci. U.S.A. | 325 | 783 |
| | | | | | containing | 89: 1685-1689 (1992) | | |
| | | | | | Monooxygenase 2) | | | |
| 16 | −3.2 | −3.7 | −2.7 | −3.2 | keratinocyte | Proc. Natl. Acad. Sci. U.S.A. | 326 | 784 |
| | | | | | transglutaminase gene | 87: 9333-9337 (1990) | | |
| 17 | −4.1 | | −6.1 | −14.2 | class I alcohol | Eur. J. Biochem. 145: 447- | 327 | 785 |
| | | | | | dehydrogenase, gamma | 453 (1984) | | |
| | | | | | subunit | | | |
| 18 | −6.3 | −4 | −6.5 | −3 | carbonic anhydrase XII | Proc. Natl. Acad. Sci. U.S.A. | 328 | 786 |
| | | | | | precursor | 92: 11810-11813 (1995) | | |
| 19 | −2.3 | | −2.1 | −4.3 | seladin-1 | DNA Res. 1: 47-56 (1994) | 329 | 787 |
| 20 | −3.2 | −2.7 | −2.2 | | glycogen phosphorylase | Proc. Natl. Acad. Sci. U.S.A. | 330 | 788 |
| | | | | | | 83: 8132-8136 (1986) | | |
| 21 | −3.2 | | | −3 | ATPase, Class V, type | DNA Res. 5 (5). 277-286 | 331 | 789 |
| | | | | | 10B | (1998) | | |
| 22 | −2.1 | | | −2.5 | bleomycin hydrolase | Cancer Res. 56: 1746-1750 | 332 | 790 |
| | | | | | | (1996) | | |
| 23 | −6.8 | | −6.9 | −27.6 | aldehyde dehydrogenase | Adv. Exp. Med. Biol. | 333 | 791 |
| | | | | | 3B2 | 372: 159-168 (1995) | | |
| 24 | −4.2 | | | −3.5 | crystallin. mu | Proc. Natl. Acad. Sci. U.S.A. | 334 | 792 |
| | | | | | | 89: 9292-9296 (1992) | | |
| 25 | −3 | | −3 | −5.1 | epoxide hydrolase 1. | Nucleic Acids Res. 15: - | 335 | 793 |
| | | | | | microsomal (xenobiotic) | (1987) | | |
| 26 | −3.6 | −2.6 | −3.9 | −6.2 | ceruloplasmin | Proc. Natl. Acad. Sci. U.S.A. | 336 | 794 |
| | | | | | (ferroxidase) | 83: 3257-3261 (1986) | | |
| 27 | −4.4 | | −7.4 | −14.4 | cytidine monophospho- | J. Biol. Chem. 270: 16458- | 337 | 795 |
| | | | | | N-acetylneuraminic acid | 16463 (1995) | | |
| | | | | | hydroxylase | | | |
| 28 | −2.7 | | | −2 | long-chain fatty-acid- | J. Biochem. 111: 123-128 | 338 | 796 |
| | | | | | Coenzyme A ligase 2 | (1992) | | |
| 29 | −3 | | −3.5 | −4.4 | glutamate-ammonia | Unpublished | 339 | 797 |
| | | | | | ligase (glutamine | | | |
| | | | | | synthase) | | | |
| 30 | −2.1 | | −2.3 | −4.3 | flavin containing | Proc. Natl. Acad. Sci. U.S.A | 340 | 798 |
| | | | | | monooxygenase 3 | 89: 1685-1689 (1992) | | |
| 31 | −6.5 | −6 | −12.2 | −2.8 | plasma glutathione | Arch. Biochem. Biophys. | 341 | 799 |
| | | | | | peroxidase 3 precursor | 256: 677-686 (1987) | | |
| 32 | −3.4 | −2.3 | −2.4 | −2.7 | KIAA0878 protein | Unpublished | 342 | 800 |
| 33 | −5.3 | | | −3 | KIAA1055 protein | DNA Res. 6 (3), 197-205 | 343 | 801 |
| | | | | | | (1999) | | |
| 34 | −2.6 | | −2.1 | | KIAA0843 protein | Unpublished | 344 | 802 |
| 35 | −2 | | | −3.7 | hypothetical protein | J. Biol. Chem. 276: 45358- | 345 | 803 |
| | | | | | MGC5487 | 45366 (2001) | | |

[0423] TABLE 22

| | | | | | | | | | | lot 1 | |
|---|---|---|---|---|---|---|---|---|---|---|---|
| | Cat_{—} | | | | | | | gene | | Day 3 | |
| | tag | category | Probe ID | Chip | accession | RefSeq | RefSeq | symbol | map location | AI | IMM |
| 36 | 10 | kinase | 1108_s_at | HG-U95A | M18391 | NM_005232 | NP_005223 | EPHA1 | 7q32-q36 | | |
| 37 | 10 | kinase | 33804_at | HG-U95A | U43522 | NM_004103 | NP_004094 | PTK2B | 8p21.1 | | |
| 38 | 10 | kinase | 36502_at | HG-U95A | AB020641 | NM_012395 | NP_036527 | PFTK1 | 7q21-q22 | −3.9 | −2.6 |
| 39 | 10 | kinase | 39120_at | HG-U95A | AA224832 | NM_013233 | NP_037365 | STK39 | 2q24.3 | −3.9 | |
| 40 | 11 | matrix protein | 36881_at | HG-U95A | X71129 | NM_001985 | NP_001976 | ETFB | 19q13.3 | | |
| 41 | 11 | matrix protein | 37600_at | HG-U95A | U68186 | NM_004425 | NP_004416 | ECM1 | 1q21 | | |
| | | | | | | NM_022664 | NP_073155 | | | | |
| 42 | 12 | membrane protein | 1042_at | HG-U95A | U27185 | NM_002888 | NP_002879 | RARRES1 | 3q25.33 | −3.1 | |
| 42 | 12 | membrane protein | 33505_at | HG-U95A | AI887421 | NM_002888 | NP_002879 | RARRES1 | 3q25.33 | −2.2 | |
| 43 | 12 | membrane protein | 33331_at | HG-U95A | U17077 | NM_005434 | NP_005425 | BENE | 2q13 | −3.7 | −2.8 |
| 44 | 12 | membrane protein | 33792_at | HG-U95A | AF043498 | NM_005672 | NP_005663 | PSCA | 8q24.2 | −6 | −3.9 |
| 45 | 12 | membrane protein | 34280_at | HG-U95A | Y09765 | NM_004961, | NP_004952, | GABRE | Xq28 | −2 | |
| | | | | | | NM_021984, | NP_068819, | | | | |
| | | | | | | NM_021987. | NP_068822. | | | | |
| | | | | | | NM_021990 | NP_068830 | | | | |
| 46 | 12 | membrane protein | 34288_at | HG-U95A | U67784 | XM_051522 | XP_051522 | RDC1 | 2q37.3 | −4.1 | |
| 47 | 12 | membrane protein | 34898_at | HG-U95A | M30704 | NM_001657 | NP_001648 | AREG | 4q13-q21 | −2.3 | −4.2 |
| 48 | 12 | membrane protein | 38223_at | HG-U95A | AB024057 | NM_007063 | NP_008994 | VRP | 2q11.1-q11.2 | | |
| 49 | 12 | membrane protein | 38379_at | HG-U95A | X76534 | NM_002510 | NP_002501 | GPNMB | 7p15 | −3.3 | |
| 50 | 12 | membrane protein | 38750_at | HG-U95A | U97669 | NM_000435 | NP_000426 | NOTCH3 | 19p13.2- | −2.9 | −3.5 |
| | | | | | | | | | p13.1 | | |
| 51 | 12 | membrane protein | 39310_at | HG-U95A | X86163 | NM_000623 | NP_000614 | BDKRB2 | 14q32.1- | −2.1 | |
| | | | | | | | | | q32.2 | | |
| 52 | 12 | membrane protein | 40990_at | HG-U95A | AF065389 | NM_005723 | NP_005714 | TSPAN-5 | 4q23 | | −2.8 |

| | lot 1 | | lot 2 | | | | | |
|---|---|---|---|---|---|---|---|---|
| | Day 7 | | Day 3 | Day 7 | | | SEQ ID NO: | SEQ ID NO: |
| | AI | IMM | AI | AI | title | reference | (nucleotide seq.) | (amino acid seq.) |
| 36 | −3.2 | | −2.8 | −3.6 | EphA1 | Science 238: 1717-1720 | 346 | 804 |
| | | | | | | (1987) | | |
| 37 | −6.4 | −4.1 | −3.7 | −3.5 | protein tyrosine kinase 2 | Nature 363: 364-367 (1993) | 347 | 805 |
| | | | | | beta | | | |
| 38 | | −3.2 | −2.3 | −3.5 | PFTAIRE protein kinase 1 | DNA Res. 5: 355-364 (1998) | 348 | 806 |
| 39 | −2.9 | −2 | −2.6 | −2.3 | Ste-20 related kinase | Oncogene 19: 4290-4297 | 349 | 807 |
| | | | | | | (2000) | | |
| 40 | −2 | | | −3.4 | electron-transfer- | Nucleic Acids | 350 | 808 |
| | | | | | flavoprotein, beta | Res. 19 (14), | | |
| | | | | | polypeptide | 4021 (1991) | | |
| 41 | −4.7 | −18.4 | | −11 | extracellular matrix | Matrix Biol. | 351, 352 | 809, 810 |
| | | | | | protein 1, isoform 1 | 16: 289-292 | | |
| | | | | | precursor NM_022664 | (1997) | | |
| | | | | | (analysis) extracellular | | | |
| | | | | | matrix protein 1, isoform | | | |
| | | | | | 2 precursor | | | |
| 42 | | −3.5 | −3.1 | −2.4 | retinoic acid receptor | J. Invest. Dermatol. | 353 | 811 |
| | | | | | responder (tazarotene | 106: 269-274 (1996) | | |
| | | | | | induced) 1 | | | |
| 42 | −3.3 | −2.7 | −3.5 | −3.4 | retinoic acid receptor | J. Invest. Dermatol. | 353 | 811 |
| | | | | | responder (tazarotene | 106: 269-274 (1996) | | |
| | | | | | induced) 1 | | | |
| 43 | −7.3 | −4.7 | −4.8 | −8.5 | BENE protein | Gene 159: 199-202 | 354 | 812 |
| | | | | | | (1995) | | |
| 44 | −5.8 | | −4.9 | −9.2 | prostate stem cell | Unpublished | 355 | 813 |
| | | | | | antigen | | | |
| 45 | −2 | | | −3.2 | Homo sapiens mRNA for | Nature 385: 820- | 356, 357, | 814, 815, |
| | | | | | putative GABA receptor | 823 (1997) | 358, 359 | 816, 817 |
| | | | | | epsilon subunit, isoform | | | |
| | | | | | 1-4 | | | |
| 46 | −5.3 | −2.2 | −3.7 | −3 | G protein-coupled | — | 360 | 818 |
| | | | | | receptor | | | |
| 47 | −4.8 | −5.2 | −14.6 | | amphiregulin | Mol Cell Biol 10: 1969- | 361 | 819 |
| | | | | | (schwannoma-derived | 81(1990) | | |
| | | | | | growth factor) | | | |
| 48 | −2.5 | | −2 | −2.4 | vascular Rab-GAP/TBC- | Nucleic Acids Res. | 362 | 820 |
| | | | | | containing | 27: 2591-2600 (1999) | | |
| 49 | 3.6 | 4.9 | −2.2 | | glycoprotein | Int. J. Cancer 60: 73- | 363 | 821 |
| | | | | | (transmembrane) nmb | 81 (1995) | | |
| 50 | −4.6 | −2.7 | −4.5 | −3.5 | Notch homolog 3 | Nat Genet. 3: 256-259 | 364 | 822 |
| | | | | | | (1993) | | |
| 51 | | | −2.4 | −4.2 | bradykinin receptor B2 | Biochem. Biophys. Res. | 365 | 823 |
| | | | | | | Commun. 184: 260-268 | | |
| | | | | | | (1992) | | |
| 52 | −3.6 | −2.8 | −3.2 | −6 | tetraspan 5 | Biochim. Biophys. Acta | 366 | 824 |
| | | | | | | 1399: 101-104 (1998) | | |

[0424] TABLE 23

| | | | | | | | | | | lot 1 | |
|---|---|---|---|---|---|---|---|---|---|---|---|
| | Cat_{—} | | | | | | | | | Day 3 | |
| | tag | category | Probe ID | Chip | accession | RefSeq | RefSeq | gene symbol | map location | AI | IMM |
| 53 | 13 | metabolism | 32349_at | HG-U95A | AJ238979 | NM_007193 | NP_009124 | ANXA10 | 4q33 | | |
| 54 | 13 | metabolism | 32464_at | HG-U95A | AF071216 | NM_004942 | NP_004933 | DEFB2 | 8p23.1-p22 | | |
| 55 | 13 | metabolism | 36496_at | HG-U95A | AF014398 | NM_014214 | NP_055029 | IMPA2 | 18p11.2 | −2.8 | |
| 56 | 13 | metabolism | 37399_at | HG-U95A | D17793 | NM_003739 | NP_003730 | AKR1C3 | 10p15-p14 | −3.3 | |
| 57 | 13 | metabolism | 37482_at | HG-U95A | U37100 | NM_020299 | NP_064695 | AKR1B10 | 7q33 | −6.5 | −2.8 |
| 58 | 13 | metabolism | 39799_at | HG-U95A | M94856 | NM_001444 | NP_001435 | FABP5 | 8q21.13 | | |
| 59 | 14 | MHC | 38095_i_at | HG-U95A | M83664 | NM_002121 | NP_002112 | HLA-DPB1 | 6p21.3 | | |
| 59 | 14 | MHC | 38096_f_at | HG-U95A | M83664 | NM_002121 | NP_002112 | HLA-DPB1 | 6p21.3 | | |
| 60 | 15 | MMP related | 1006_at | HG-U95A | X07820 | NM_002425 | NP_002416 | MMP10 | 11q22.3 | −6.3 | −3.4 |
| 61 | 15 | MMP related | 31859_at | HG-U95A | J05070 | NM_004994 | NP_004985 | MMP9 | 20q11.2- | −25.5 | −7.3 |
| | | | | | | | | | q13.1 | | |
| 62 | 16 | oncogenesis | 1915_s_at | HG-U95A | V01512 | NM_005252 | NP_005243 | c-fos | 14q24.3 | −2 | |
| 62 | 16 | oncogenesis | 1916_s_at | HG-U95A | V01512 | NM_005252 | NP_005243 | c-fos | 14q24.3 | −2.2 | |
| 63 | 16 | oncogenesis | 36933_at | HG-U95A | D87953 | NM_006096 | NP_006087 | NDRG1 | 8q24 | −4.9 | −2.3 |
| 64 | 16 | oncogenesis | 37283_at | HG-U95A | X82209 | NM_002430 | NP_002421 | MN1 | 22q12.1 | | |
| 65 | 16 | oncogenesis | 37821_at | HG-U95A | AF041260 | NM_003657 | NP_003648 | BCAS1 | 20q13.2- | | |
| | | | | | | | | | q13.3 | | |
| 66 | 16 | oncogenesis | 38827_at | HG-U95A | AF038451 | NM_006408 | NP_006399 | AGR2 | 7p21.3 | | |

| | lot 1 | | lot 2 | | | | | |
|---|---|---|---|---|---|---|---|---|
| | Day 7 | | Day 3 | Day 7 | | | SEQ ID NO: | SEQ ID NO: |
| | AI | IMM | AI | AI | title | reference | (nucleotide seq.) | (amino add seq.) |
| 53 | −2.5 | | −7.5 | −18.9 | annexin A10 | Cancer Res. 56: 3441-3445 | 367 | 825 |
| | | | | | | (1996) | | |
| 54 | −4.3 | | | −2.6 | defensin, beta 2 | Nature 387:- (1997) | 368 | 826 |
| 55 | −2 | | | −2.7 | inositol(myo)−1(or 4)- | Biochem. Biophys. Res. | 369 | 827 |
| | | | | | monophosphatase 2 | Commun. 251: 111-116 | | |
| | | | | | | (1998) | | |
| 56 | −4 | −2.3 | −2.6 | −2.8 | aldo-keto reductase | Proc. Natl. Acad. Sci. U.S.A. | 370 | 828 |
| | | | | | family 1, member C3 (3- | 80: 3183-3187 (1983) | | |
| | | | | | alpha hydroxysteroid | | | |
| | | | | | dehydrogenase. t | | | |
| 57 | −7.5 | −6.7 | −7.1 | −9.7 | NM_020299 (analysis) | J. Biol. Chem. 273 (19), | 371 | 829 |
| | | | | | aldo-keto reductase | 11429-11435 (1998) | | |
| | | | | | family 1, member B10 | | | |
| | | | | | (aldose reductase) | | | |
| 58 | −4.2 | −3.7 | −3 | −3 | fatty acid binding protein | J. Invest. Dermatol. 99: 299- | 372 | 830 |
| | | | | | 5 (psoriasis-associated) | 305 (1992) | | |
| 59 | −4.4 | | | −2.5 | major histocompatibility | Cell 38: 241-249 (1984) | 373 | 831 |
| | | | | | complex, class II, DP beta | | | |
| | | | | | 1 | | | |
| 59 | −2.6 | | | −3.3 | major histocompatibility | Cell 38: 241-249 (1984) | 373 | 831 |
| | | | | | complex, class II, DP beta | | | |
| | | | | | 1 | | | |
| 60 | | | −30.3 | −35.2 | matrix metalloproteinase | Biochem. J. 253: 187-192 | 374 | 832 |
| | | | | | 10 preproprotein | (1988) | | |
| 61 | −10.9 | −16 | −18 | −113.5 | matrix metalloproteinase | J. Biol. Chem. 264: 17213- | 375 | 833 |
| | | | | | 9 preproprotein | 17221 (1989) | | |
| 62 | | −4.3 | −2 | −2.3 | cellular oncogene c-fos | Proc. Natl. Acad. Sci. U.S.A. | 376 | 834 |
| | | | | | (complete sequence) | 80: 3183-3187 (1983) | | |
| 62 | −2.6 | −4.7 | −3.1 | −3.6 | cellular oncogene c-fos | Proc. Natl. Acad. Sci. U.S.A. | 376 | 834 |
| | | | | | (complete sequence) | 80: 3183-3187 (1983) | | |
| 63 | −3.6 | −2.4 | −2.9 | | N-myc downstream | J. Biol. Chem. 271: 9-29665 | 377 | 835 |
| | | | | | regulated gene 1 | (2965) | | |
| 64 | −3.2 | | | −7.3 | meningioma 1 | Oncogene 10: 1521-1528 | 378 | 836 |
| | | | | | | (1995) | | |
| 65 | −3.7 | | −4.6 | −13.2 | breast carcinoma | Cancer Res. 56: 3441-3445 | 379 | 837 |
| | | | | | amplified sequence 1 | (1996) | | |
| 66 | −2.7 | | | −3.7 | anterior gradient 2 | Biochem. Biophys. Res. | 380 | 838 |
| | | | | | homolog (Xenepus laevis) | Commun. 251: 111-116 | | |
| | | | | | | (1998) | | |

[0425] TABLE 24

| | | | | | | | | | | lot 1 | |
|---|---|---|---|---|---|---|---|---|---|---|---|
| | Cat_{—} | | | | | | | | | Day 3 | |
| | tag | category | Probe ID | Chip | accession | RefSeq | RefSeq | gene symbol | map location | AI | IMM |
| 67 | 17 | others | 1230_g_at | HG-U95A | U78556 | NM_006697 | NP_006688 | CRA | 1q12-q21 | | −2.3 |
| 68 | 17 | others | 32527_at | HG-U95A | AI381790 | NM_006829 | NP_006820 | APM2 | 10q23.2 | | −2.1 |
| 69 | 17 | others | 32817_at | HG-U95A | AL096881 | NM_012429 | NP_036561 | SEC14L2 | 22q12.2 | −2.1 | |
| 70 | 17 | others | 38151_at | HG-U95A | AF002672 | NM_014622 | NP_055437 | LOH11CR2A | 11q23 | −2.1 | |
| 71 | 17 | others | 38803_at | HG-U95A | AF052142 | NM_032041 | NP_114430 | NCALD | 8q22-q23 | | |
| 72 | 17 | others | 39827_at | HG-U95A | AA522530 | NM_019058 | NP_061931 | RTP801 | 10pter- | | |
| | | | | | | | | | q26.12 | | |
| 73 | 17 | others | 41641_at | HG-U95A | AJ223603 | NM_014400 | NP_055215 | C4.4A | 19q13.32 | | |
| 74 | 18 | P450 | 1371_s_at | HG-U95A | M29874 | NM_000767 | NP_000758 | CYP2B6 | 19q13.2 | −7.1 | −3.4 |
| 75 | 18 | P450 | 37124_i_at | HG-U95A | J04813 | NM_000777 | NP_000768 | CYP3A5 | 7q21.1 | −2.5 | |
| 75 | 18 | P450 | 37125_f_at | HG-U95A | J04813 | NM_000777 | NP_000768 | CYP3A5 | 7q21.1 | −2.1 | |
| 76 | 19 | phosphatase | 1005_at | HG-U95A | X68277 | NM_004417 | NP_004408 | DUSP1 | 5q34 | −2.8 | −2.4 |
| 77 | 19 | phosphatase | 1364_at | HG-U95A | M93426 | NM_002851 | NP_002842 | PTPRZ1 | 7q31.3 | | |
| 78 | 20 | protein binding protein | 1586_at | HG-U95A | M35878 | NM_000598 | NP_000589 | IGFBP3 | 7p13-p12 | −2.4 | |
| 78 | 20 | protein binding protein | 37319_at | HG-U95A | M35878 | NM_000598 | NP_000589 | IGFBP3 | 7p13-p12 | −2.7 | −2 |
| 79 | 20 | protein binding protein | 1736_at | HG-U95A | M62402 | NM_002178 | NP_002169 | IGFBP6 | 12q13 | −3.6 | −2.8 |
| 80 | 20 | protein binding protein | 32149_at | HG-U95A | AA532495 | NM_002443 | NP_002434 | MSMB | 10q112 | −8.6 | −3.7 |
| | | | | | | NM_138634 | NP_619540 | | | | |

| | lot 1 | | lot 2 | | | | | |
|---|---|---|---|---|---|---|---|---|
| | Day 7 | | Day 3 | Day 7 | | | SEQ ID NO: | SEQ ID NO: |
| | AI | IMM | AI | AI | title | reference | (nucleotide seq.) | (amino acid seq.) |
| 67 | −2 | | −3.4 | −3 | cisplatin resistance | Unpublished | 381 | 839 |
| | | | | | associated | | | |
| 68 | −3.8 | −6.2 | −2.7 | −3.3 | adipose specific 2 | Biochem. Biophys. Res. | 382 | 840 |
| | | | | | | Commun. 221: 286-289 | | |
| | | | | | | (1996) | | |
| 69 | | −2.9 | −6.9 | | SEC14 (S. cerevisiae)- | J. Biol. Chem. 275: 25672- | 383 | 841 |
| | | | | | like 2 | 25680 (2000) | | |
| 70 | | | −3.2 | | loss of heterozygosity, 11, | Genomics 46: 217-222 | 384 | 842 |
| | | | | | chromosomal region 2, | (1997) | | |
| | | | | | gene A | | | |
| 71 | −2.8 | | | −4.2 | clone 24665 mRNA | Anal. Biochem. 236: 107-113 | 385 | 843 |
| | | | | | (neurocalcin delta) | (1996) | | |
| 72 | −2 | | −2.3 | −2.4 | RTP801 | Mol. Cell. Biol. 22: 2283- | 386 | 844 |
| | | | | | | 2293 (2002) | | |
| 73 | −2.5 | | | −6.8 | GPI-anchored | Oncogene 19: 4290-4297 | 387 | 845 |
| | | | | | metastasis-associated | (2000) | | |
| | | | | | protein homolog | | | |
| 74 | −8.2 | | −13 | −3.4 | cytochrome P450, | Biochemistry 28: 7340-7348 | 388 | 846 |
| | | | | | subfamily IIB | (1989) | | |
| | | | | | (phenobarbital-inducible), | | | |
| | | | | | polypeptide 6 | | | |
| 75 | | | −5.2 | −6.2 | cytochrome P450, | J. Biol. Chem. 264: 8-10395 | 389 | 847 |
| | | | | | subfamily IIIA, polypeptide | (1038) | | |
| | | | | | 5 | | | |
| 75 | | | −4.5 | −6.6 | cytochrome P450, | J. Biol. Chem. 264: 8-10395 | 389 | 847 |
| | | | | | subfamily IIIA, polypeptide | (1038) | | |
| | | | | | 5 | | | |
| 76 | | | −4.3 | | dual specificity | Nature 359: 644-647 (1992) | 390 | 848 |
| | | | | | phosphatase 1 | | | |
| 77 | −3.7 | | −4.3 | −14.9 | protein tyrosine | Proc. Natl. Acad. Sci. U.S.A. | 391 | 849 |
| | | | | | phosphatase, receptor- | 89: 7417-7421 (1992) | | |
| | | | | | type, Z polypeptide 1 | | | |
| 78 | −2.4 | −3.1 | −2.9 | | insulin-like growth factor | Unpublished | 392 | 850 |
| | | | | | binding protein 3 | | | |
| 78 | −2.7 | −3.1 | −3 | | insulin-like growth factor | Unpublished | 392 | 850 |
| | | | | | binding protein 3 | | | |
| 79 | −7.7 | −5.4 | −4.7 | −7.2 | insulin-like growth factor | Biochem. Biophys. Res. | 393 | 851 |
| | | | | | binding protein 6 | Commun. 176: 219-225 | | |
| | | | | | | (1991) | | |
| 80 | −11.7 | | −21.3 | −8.1 | microseminoprotein, | FEBS Lett. 175: 349-355 | 394, 395 | 852, 853 |
| | | | | | beta- | (1984) | | |

[0426] TABLE 25

| | | | | | | | | | | lot 1 | |
|---|---|---|---|---|---|---|---|---|---|---|---|
| | Cat_{—} | | | | | | | | | Day 3 | |
| | tag | category | Probe ID | Chip | accession | RefSeq | RefSeq | gene symbol | map location | AI | IMM |
| 81 | 21 | proteinase | 40717_at | HG-U95A | AB001928 | NM_001333 | NP_001324 | CTSL2 | 9q22.2 | −2.8 | −2.2 |
| 82 | 22 | proteinase inhibitor | 33305_at | HG-U95A | M93056 | NM_030666 | NP_109591 | SERPINB1 | 6p25 | | |
| 83 | 22 | proteinase inhibitor | 33825_at | HG-U95A | X68733 | NM_001085 | NP_001076 | SERPINA3 | 14q32.1 | | −3.8 |
| 84 | 22 | proteinase inhibitor | 38125_at | HG-U95A | M14083 | NM_000602 | NP_000593 | SERPINE1 | 7q21.3-q22 | −6.9 | −4.2 |
| 84 | 22 | proteinase inhibitor | 672_at | HG-U95A | J03764 | NM_000602 | NP_000593 | SERPINE1 | 7q21.3-q22 | −12 | −7.7 |
| 85 | 22 | proteinase inhibitor | 862_at | HG-U95A | U04313 | NM_002639 | NP_002630 | SERPINB5 | 18q21.3 | −2.2 | |
| 86 | 23 | S100 | 41096_at | HG-U95A | AI126134 | NM_002964 | NP_002955 | S100A8 | 1q21 | −5.4 | |

| | lot 1 | | lot 2 | | | | | |
|---|---|---|---|---|---|---|---|---|
| | Day 7 | | Day 3 | Day 7 | | | SEQ ID NO: | SEQ ID NO: |
| | AI | IMM | AI | AI | title | reference | (nucleotide seq.) | (amino add seq.) |
| 81 | | | −3.2 | −5.6 | cathepsin L2 | Cancer Res. 58: 1624-1630 | 396 | 854 |
| | | | | | | (1998) | | |
| 82 | −2.3 | −2.1 | | −2.9 | serine (or cysteine) | Proc. Natl. Acad. Sci. U.S.A. | 397 | 855 |
| | | | | | proteinase inhibitor, clade | 89: 5635-5639 (1992) | | |
| | | | | | 3 (ovalbumin), member 1 | | | |
| 83 | −14.1 | −5.9 | −7 | −9.3 | serine (or cysteine) | Biochem. Biophys. Res. | 398 | 856 |
| | | | | | proteinase inhibitor, clade | Commun. 111: 438-443 | | |
| | | | | | A (alpha-1antiproteinase, | (1983) | | |
| | | | | | antitrypsin), member3 | | | |
| 84 | −18.3 | −20.1 | −11.2 | −11 | serine (or cysteine) | Proc. Natl. Acad. Sci. U.S.A. | 399 | 857 |
| | | | | | proteinase inhibitor, clade | 83: 6776-6780 (1986) | | |
| | | | | | E (nexin, plasminogen | | | |
| | | | | | activator inhibitor type 1), | | | |
| | | | | | member 1 | | | |
| 84 | −7.8 | −31.3 | −62.1 | −34.4 | serine (or cysteine) | Proc. Natl. Acad. Sci. U.S.A. | 399 | 857 |
| | | | | | proteinase inhibitor, clade | 83: 6776-6780 (1986) | | |
| | | | | | E (nexin, plasminogen | | | |
| | | | | | activator inhibitor type 1), | | | |
| | | | | | member 1 | | | |
| 85 | −2.2 | −2.5 | | −2.2 | serine (or cysteine) | Science 263: 526-529 (1994) | 400 | 858 |
| | | | | | proteinase inhibitor, clade | | | |
| | | | | | B (ovalbumin), member 5 | | | |
| 86 | −6.2 | | −3 | −6.1 | S100 calcium-binding | Nature 326: 614-617 (1987) | 401 | 859 |
| | | | | | protein A8 | | | |

[0427] TABLE 26

| | | | | | | | | | | lot 1 | |
|---|---|---|---|---|---|---|---|---|---|---|---|
| | Cat_{—} | | | | | | | | | Day 3 | |
| | tag | category | Probe ID | Chip | accession | RefSeq | RefSeq | gene symbol | map location | AI | IMM |
| 87 | 24 | signal transduction | 1057_at | HG-U95A | M97815 | NM_001878 | NP_001869 | CRABP-II | 1q21.3 | −4.6 | |
| 87 | 24 | signal transduction | 41783_at | HG-U95A | M97815 | NM_001878 | NP_001869 | CRABP-II | 1q21.3 | | |
| 88 | 24 | signal transduction | 35632_at | HG-U95A | U26710 | NM_004351 | NP_004342 | CBLB | 3q13.11 | | |
| 88 | 24 | signal transduction | 514_at | HG-U95A | U26710 | NM_004351 | NP_004342 | CBLB | 3qt3.11 | | |
| 89 | 24 | signal transduction | 36524_at | HG-U95A | AB029035 | NM_015320 | NP_056135 | ARHGEF4 | 2q22 | −3.5 | |
| | | | | | | NM_032995 | NP_127462 | | | | |
| 90 | 24 | signal transduction | 39220_at | HG-U95A | T92248 | NM_003357 | NP_003348 | UGB | 11q12.3- | −6 | −4 |
| | | | | | | | | | q13.1 | | |
| 91 | 24 | signal transduction | 1778_g_at | HG-U95A | L36463 | NM_004292 | NP_004283 | RIN1 | 11q13.1 | | |
| 92 | 24 | signal transduction | 1934_s_at | HG-U95A | X94216 | NM_005429 | NP_005420 | VEGFC | 4q34.1-q34.3 | | |
| 93 | 24 | signal transduction | 32737_at | HG-U95A | M64595 | NM_002872 | NP_002863 | RAC2 | 22q13.1 | −4.3 | −3.5 |
| 94 | 25 | structural protein | 34091_s_at | HG-U95A | Z19554 | NM_003380 | NP_003371 | VIM | 10p13 | −3.4 | −3.2 |
| 95 | 25 | structural protein | 36113_s_at | HG-U95A | AJ011712 | NM_003283 | NP_003274 | TNNT1 | 19q13.4 | | |
| 96 | 25 | structural protein | 36355_at | HG-U95A | M13903 | MM_005547 | NP_005538 | IVL | 1q21 | −6.8 | −8.4 |
| 97 | 25 | structural protein | 36790_at | HG-U95A | M19267 | NM_000366 | NP_000357 | TPM1 | 15q22.1 | −2.9 | |
| 97 | 25 | structural protein | 36791_g_at | HG-U95A | M19267 | NM_000366 | NP_000357 | TPM1 | 15q22.1 | −2.5 | −2.2 |
| 97 | 25 | structural protein | 36792_at | HG-U95A | Z24727 | NM_000366 | NP_000357 | TPM1 | 15q22.1 | −2.6 | |
| 98 | 25 | structural protein | 37160_at | HG-U95A | M19888 | NM_003125 | NP_003116 | SPRR1B | 1q21-q22 | | |
| 99 | 25 | structural protein | 37582_at | HG-U95A | X07696 | NM_002275 | NP_002266 | KRT15 | 17q21 | −5.2 | |
| 100 | 25 | structural protein | 39569_at | HG-U95A | U72849 | NM_001988 | NP_001979 | EVPK | 17q25 | | |

| | lot 1 | | lot 2 | | | | | |
|---|---|---|---|---|---|---|---|---|
| | Day 7 | | Day 3 | Day 7 | | | SEQ ID NO: | SEQ ID NO: |
| | AI | IMM | AI | AI | title | reference | (nucleotide seq.) | amino acid seq.) |
| 87 | −5.4 | −2.7 | −4.7 | −12.7 | Human retinoic acid- | J. Biol. Chem. 266: 17662- | 402 | 860 |
| | | | | | binding protein II | 17666 (1991) | | |
| | | | | | (CRABP-II) gene exons | | | |
| | | | | | 2-4, complete cds | | | |
| 87 | −8.8 | | −5.4 | −11.3 | Human retinoic acid- | J. Biol. Chem. 266: 17662- | 402 | 860 |
| | | | | | binding protein II | 17666 (1991) | | |
| | | | | | (CRABP-II) gene exons | | | |
| | | | | | 2-4, complete cds | | | |
| 88 | −2 | −2 | | −2.1 | Cas-Br-M (murine) | Oncogene 10: 2367-2377 | 403 | 861 |
| | | | | | ectropic retroviral | (1995) | | |
| | | | | | transforming sequence b | | | |
| 88 | −4.2 | −2.4 | −4.6 | −3.2 | Cas-Br-M (murine) | Oncogene 10: 2367-2377 | 403 | 861 |
| | | | | | ectropic retroviral | (1995) | | |
| | | | | | transforming sequence b | | | |
| 89 | −4.1 | −2.2 | | −6.6 | Rho guanine nucleotide | Biochem. Biophys. Res. | 404, 405 | 862, 863 |
| | | | | | exchange factor 4, | Commun. 273: 364-369 | | |
| | | | | | isoform a NM_032995 Rho | (2000) | | |
| | | | | | guanine nucleotide | | | |
| | | | | | exchange factor 4, | | | |
| | | | | | isoform b | | | |
| 90 | −28.1 | −8.2 | −17.8 | −62.8 | uteroglobin | Hum. Mol. Genet 1: 371-378 | 406 | 864 |
| | | | | | | (1992) | | |
| 91 | −2.1 | | | −7.5 | ras inhibitor | Nature 315: 666-669 (1985) | 407 | 865 |
| 92 | −2.4 | | −2.5 | −4.3 | vascular endothelial | EMBO J. 15: 290-298 (1996) | 408 | 866 |
| | | | | | growth factor C | | | |
| 93 | −4.9 | −3.2 | −17.4 | | ras-related C3 botulinum | J. Biol. Chem. 264: 16378- | 409 | 867 |
| | | | | | toxin substrate 2 | 16382 (1989) | | |
| 94 | −9.4 | −6.6 | −3.1 | −11.6 | vimentin | Mol. Cell. Biol. 6: 3614-3620 | 410 | 868 |
| | | | | | | (1986) | | |
| 95 | −5.5 | −4.9 | | −12.2 | troponin T1, skeletal, slow | Unpublished | 411 | 869 |
| 96 | −3.7 | −4.5 | −3.6 | −10.6 | involucrin | Cell 46: 583-589 (1986) | 412 | 870 |
| 97 | −3.3 | −5.5 | −5.4 | −4.8 | tropomyosin 1 (alpha) | Mol. Cell. Biol. 8: 160-168 | 413 | 871 |
| | | | | | | (1988) | | |
| 97 | −3.2 | −7.5 | −3.5 | −6 | tropomyosin 1 (alpha) | Mol. Cell. Biol. 8: 160-168 | 413 | 871 |
| | | | | | | (1988) | | |
| 97 | −3.9 | −5.7 | −5 | −6.3 | tropomyosin 1 (alpha) | Mol. Cell. Biol. 8: 160-168 | 413 | 871 |
| | | | | | | (1988) | | |
| 98 | −2.1 | −2.4 | | −2.8 | small proline-rich protein | Mol. Cell. Biol. 8: 2195-2203 | 414 | 872 |
| | | | | | 1B (cornifin) | (1988) | | |
| 99 | −2.6 | −2 | −2.7 | | keratin 15 | J. Cell Biol. 106: 1249-1261 | 415 | 873 |
| | | | | | | (1988) | | |
| 100 | −2 | | | −2.7 | envoplakin | J. Cell Biol. 134: 715-729 | 416 | 874 |
| | | | | | | (1996) | | |

[0428] TABLE 27

| | | | | | | | | | | lot 1 | |
|---|---|---|---|---|---|---|---|---|---|---|---|
| | Cat_{—} | | | | | | | | | Day 3 | |
| | tag | category | Probe ID | Chip | accession | RefSeq | RefSeq | gene symbol | map location | AI | IMM |
| 101 | 26 | transcription factor | 1452_at | HG-U95A | U24576 | NM_006769 | NP_006760 | LMO4 | 1p22.3 | | |
| 102 | 26 | transcription factor | 33439_at | HG-U95A | D15050 | NM_030751 | NP_110378 | TCF8 | 10p11.2 | −2.5 | −2.7 |
| 103 | 26 | transcription factor | 34216_at | HG-U95A | AA478904 | NM_003709 | NP_003700 | KLF7 | 2q34 | −2.5 | −3.3 |
| 104 | 26 | transcription factor | 35425_at | HG-U95A | AJ243512 | NM_003658 | NP_003649 | BARX2 | 11q25 | −3.1 | |
| 105 | 26 | transcription factor | 36619_r_at | HG-U95A | S78825 | NM_002165 | NP_002156 | ID1 | 20q11 | | |
| 106 | 26 | transcription factor | 41246_at | HG-U95A | AI743134 | NM_005878 | NP_005869 | TNRC3 | 4q28.3 | −2.9 | |
| 107 | 27 | transporter | 1932_at | HG-U95A | U83661 | NM_005688 | NP_005679 | ABCC5 | 3q27 | | |
| 108 | 27 | transporter | 32531_at | HG-U95A | X52947 | NM_000165 | NP_000156 | GJA1 | 6q21-q23.2 | −4.4 | |
| 109 | 27 | transporter | 32909_at | HG-U95A | U46569 | NM_001651 | NP_001642 | AQP5 | 12q13 | −6.3 | −3.1 |
| 110 | 27 | transporter | 37591_at | HG-U95A | U94592 | NM_003355 | NP_003346 | UCP2 | 11q13 | | −2.3 |
| 111 | 27 | transporter | 39682_at | HG-U95A | X87159 | NM_000336 | NP_000327 | SCNN1B | 16p12.2- | | |
| | | | | | | | | | p12.1 | | |
| 112 | 27 | transporter | 40297_at | HG-U95A | AC005053 | NM_012449 | NP_036581 | STEAP | 7q21 | −2.2 | −2.3 |
| 113 | 27 | transporter | 40339_at | HG-U95A | U95367 | NM_014211 | NP_055026 | GABRP | 5q33-q34 | −2.2 | |
| 114 | | | 33546_at | HG-U95A | AI923984 | | — | | | −3.2 | |
| 115 | | | 38262_at | HG-U95A | AF052107 | | — | | | −2.5 | |
| 116 | | | 40191_s_at | HG-U95A | AI761647 | | — | | | | |

| | lot 1 | | lot 2 | | | | | |
|---|---|---|---|---|---|---|---|---|
| | Day 7 | | Day 3 | Day 7 | | | SEQ ID NO: | SEQ ID NO: |
| | AI | IMM | AI | AI | title | reference | (nucleotide seq.) | (amino acid seq.) |
| 101 | −2 | | | −3.9 | LIM domain only 4 | Proc. Natl. Acad. Sci. U.S.A. | 417 | 875 |
| | | | | | | 95: 11257-11262 (1998) | | |
| 102 | −2.1 | −2.4 | −2.7 | | ion factor 8 (represses | Science 254: 1791-1794 | 418 | 876 |
| | | | | | interleukin 2 expression) | (1991) | | |
| 103 | | −6.3 | −2.6 | | Kruppel-like factor 7 | J. Biol. Chem. 273: 28229- | 419 | 877 |
| | | | | | (ubiquitous) | 28237 (1998) | | |
| 104 | −2.4 | −2.7 | −2.5 | | BarH-like homeobox 2 | Proc. Natl. Acad. Sci. USA | 420 | 878 |
| | | | | | | 94: 2632-2637 (1997) | | |
| 105 | −8 | −3.9 | −2.3 | −2.5 | inhibitor of DNA binding 1 | J. Biol. Chem. 269: 2139- | 421 | 879 |
| | | | | | dominant negative helix- | 2145 (1994) | | |
| | | | | | loop-helix protein | | | |
| 106 | | −2.4 | −2 | −5 | trinucleotide repeat | Hum. Genet. 100 (1), 114- | 422 | 880 |
| | | | | | containing 3 | 122 (1997) | | |
| 107 | −3.6 | | | −5 | ATP-binding cassette, | Hum. Mol. Genet. 5: 1649- | 423 | 881 |
| | | | | | sub-family C, member 5 | 1655 (1996) | | |
| 108 | −8.8 | −5.5 | −6.8 | −5.5 | connexin 43 | J. Cell Biol. 111: 589-598 | 424 | 882 |
| | | | | | | (1990) | | |
| 109 | −3.4 | −2.5 | −5.1 | −4.2 | Aqaporin-5 | J. Biol. Chem. 271: 8599- | 425 | 883 |
| | | | | | | 8604 (1996) | | |
| 110 | −12.7 | | −2.3 | −45.5 | uncoupling protein 2 | Nat Genet 15: 269-272 | 426 | 884 |
| | | | | | | (1997) | | |
| 111 | −7.6 | | −12.3 | −15 | sodium channel, | Genomics 28: 560-565 | 427 | 885 |
| | | | | | nonvoltage-gated 1, beta | (1995) | | |
| 112 | −3.1 | | −2.6 | −3.7 | six transmembrane | Proc. Natl. Acad. Sci. U.S.A. | 428 | 886 |
| | | | | | epithelial antigen of the | 96: 14523-14528 (1999) | | |
| | | | | | prostate | | | |
| 113 | −2.1 | | | −28 | gamma-aminobutyric acid | J. Biol. Chem. 272: 15346- | 429 | 887 |
| | | | | | (GABA) A receptor | 15350 (1997) | | |
| 114 | −4.6 | | | −4.4 | cDNA clone | — | 430 | — |
| | | | | | IMAGE: 2448791 | | | |
| 115 | −4.1 | −4.5 | −3.8 | −6.5 | clone 23620 mRNA | Anal. Biochem. 236 (1), | 431 | — |
| | | | | | | 107-113 (1996) | | |
| 116 | −3 | | | −4 | cDNA clone | — | 432 | — |
| | | | | | IMAGE: 2370113 | | | |

[0429] TABLE 28

| | Cat_{—} | | | | | | | | | |
|---|---|---|---|---|---|---|---|---|---|---|
| | tag | category | Probe ID | Chip | accession | RefSeq | RefSeq | gene symbol | gene symbol | map location |
| 1 | 2 | cell adhesion | 47119_at | HG-U95B | AA130221 | NM_001941, | NP_001932 | DSC3a, b | DSC3a, b | 18q12.1 |
| | | | | | | NM_024423 | NP_077741 | | | |
| 1 | 2 | cell adhesion | 79615_at | HG-U95B | AI188613 | NM_001941, | NP_001932, | DSC3a, b | DSC3a, b | 18q12.1 |
| | | | | | | NM_024423 | NP_077741 | | | |
| 2 | 5 | cytokine | 42969_at | HG-U95B | AA470014 | NM_014432 | NP_055247 | IL20RA | IL20RA | 6q22.33- |
| | | related | | | | | | | | q23.1 |
| 3 | 7 | enzyme | 42720_at | HG-U95B | AI393727 | NM_000408 | NP_000399 | GPD2 | GPD2 | 2q24.1 |
| 4 | 7 | enzyme | 56373_at | HG-U95B | AA133969 | NM_004776 | NP_004767 | B4GALT5 | B4GALT5 | 20q13.1- |
| | | | | | | | | | | q13.2 |
| 5 | 7 | enzyme | 58023 at | HG-U95B | AI199811 | NM_000847 | NP_000838 | GSTA3 | GSTA3 | 6p12 |
| 6 | 8 | hypothetical | 43546_at | HG-U95B | AI760170 | NM_022369 | NP_071764 | FLJ12541 | FLJ12541 | 15q33.33 |
| | | protein | | | | | | | | |
| 7 | 8 | hypothetical | 43853_at | HG-U95B | AA618602 | NM_019058 | NP_061931 | FLJ20500 | FLJ20500 | 10pter- |
| | | protein | | | | | | | | q26.12 |
| 8 | 8 | hypothetical | 44682_at | HG-U95B | AL039400 | NM_017606 | NP_060076 | DKFZp434K1210 | DKFZp434K1210 | 8p21.1 |
| | | protein | | | | | | | | |
| 9 | 8 | hypothetical | 44705_at | HG-U95B | AA133356 | NM_016463 | NP_057547 | HSPC195 | HSPC195 | 5q31.3 |
| | | protein | | | | | | | | |
| 10 | 8 | hypothetical | 45563_f_at | HG-U95B | AI971277 | NM_024896 | NP_079172 | FLJ23309 | FLJ23309 | 9p24 |
| | | protein | | | | | | | | |
| 11 | 8 | hypothetical | 45605_at | HG-U95B | N35799 | NM_024090 | NP_076995 | LCE | LCE | 4q25 |
| | | protein | | | | | | | | |
| 12 | 8 | hypothetical | 46924_at | HG-U95B | AI824107 | NM_032330 | NP_115706 | MGC12536 | MGC12536 | 16q12.2 |
| | | protein | | | | | | | | |
| 13 | 8 | hypothetical | 47534_at | HG-U95B | AI569980 | NM_024539 | NP_078815 | FLJ23516 | FLJ23516 | Xq22.2 |
| | | protein | | | | | | | | |
| 14 | 8 | hypothetical | 52072_at | HG-U95B | AA873182 | NM_018192 | NP_060662 | FLJ10718 | FLJ10718 | 3q29 |
| | | protein | | | | | | | | |

| | lot 1 | | | | lot 2 | | | | | |
|---|---|---|---|---|---|---|---|---|---|---|
| | Day3 | | Day 7 | | Day 3 | Day 7 | | | SEQ ID NO: | SEQ ID NO: |
| | AI | IMM | AI | IMM | AI | AI | title | reference | (nucleotide seq.) | (amino acid seq.) |
| 1 | −2.4 | −2.6 | −2.8 | −3.4 | −2.2 | −2.7 | desmocollin 3 | Genomics 10: 640- | 433, 434 | 888, 889 |
| | | | | | | | isoform a, b | 645 (1991) | | |
| 1 | | | −2.4 | −4 | | −2.4 | desmocollin 3 | Genomics 10: 640- | 433, 434 | 888, 889 |
| | | | | | | | isoform a, b | 645 (1991) | | |
| 2 | | | −2.1 | −2.9 | | −2.9 | interleukin 20 | J. Biol. Chem. 275: | 435 | 890 |
| | | | | | | | receptor, alpha | 31335-31339 (2000) | | |
| 3 | | | −2 | | | −2.8 | glycerol-3-phosphate | Gene 150 (2), 417- | 436 | 891 |
| | | | | | | | dehydrogenase 2 | 418 (1994) | | |
| | | | | | | | (mitochondrial)/ESTs | | | |
| 4 | | | −2.2 | | −2.2 | −2.5 | UDP-Gal: betaGlcNAc beta | Proc. Natl. Acad. Sci | 437 | 892 |
| | | | | | | | 1,4-galactosyltransferase, | U.S.A. 95: 472-477 | | |
| | | | | | | | polypeptide 5 | (1998) | | |
| 5 | −4.6 | | −2.7 | | −5.3 | −9.1 | glutathione S- | Genomics 18: 680- | 438 | 893 |
| | | | | | | | transferase A3 | 686 (1993) | | |
| 6 | | | −10.1 | | −3.8 | −7.4 | hypothetical protein | Unpublished | 439 | 894 |
| | | | | | | | FLJ12541 similar to Stra6 | | | |
| 7 | | | −2.1 | | | −2.4 | hypothetical protein | Mol. Cell. Biol. 22: | 440 | 895 |
| | | | | | | | | 2283-2293 (2002) | | |
| 8 | −4.4 | | −2.1 | −2.1 | −2.9 | −2.4 | hypothetical protein | Unpublished | 441 | 896 |
| | | | | | | | DKFZp434K1210 | | | |
| 9 | −2.5 | | −2.4 | | −2 | −5.1 | hypothetical protein | Genome Res. 10: 1546- | 442 | 897 |
| | | | | | | | | 1560 (2000) | | |
| 10 | | | −2 | | | −2.4 | hypothetical protein | Unpublished | 443 | 898 |
| | | | | | | | FLJ23309 | | | |
| 11 | | −2.1 | −2.6 | | | −2.6 | hypothetical protein | J. Biol. Chem. 276: | 444 | 899 |
| | | | | | | | MGC5487 | 45358-45366 (2001) | | |
| 12 | | −2.1 | −4.9 | | −4.2 | −3.1 | hypothetical protein | Biochem. J. 362: 383- | 445 | 900 |
| | | | | | | | MGC12536 | 388 (2002) | | |
| 13 | | | −4.1 | −5.4 | −2.6 | −3.2 | hypothetical protein | Unpublished | 446 | 901 |
| | | | | | | | FLJ23516 | | | |
| 14 | | | −3.8 | −8 | −5.5 | −8.7 | hypothetical protein | Unpublished | 447 | 902 |
| | | | | | | | FLJ10718 | | | |

[0430] TABLE 29

| | | | | | | | | | | | |
|---|---|---|---|---|---|---|---|---|---|---|---|
| 15 | 8 | hypothetical protein | 54030_at | HG-U95B | AI796818 | NM_017792 | NP_060262 | FLJ20373 | 2q11.2 | −2.1 | |
| 16 | 8 | hypothetical protein | 55924_at | HG-U95B | AA085776 | NM_032899 | NP_116288 | MGC14128 | 8q24.13 | −2.6 | |
| 17 | 8 | hypothetical protein | 57777_at | HG-U95B | AI536671 | NM_018584 | NP_061054 | PR01489 | 1p36.13 | −2.1 | −3.4 |
| 18 | 8 | hypothetical protein | 52473_at | HG-U95B | N71183 | | | | | | −2.4 |
| 19 | 8 | hypothetical protein | 43412_s_at | HG-U95B | AA622152 | | | MGC16207 | 11q23.3 | | |
| 20 | 8 | hypothetical protein | 46104_at | HG-U95B | AA772055 | | | | | −5.4 | |
| 21 | 8 | hypothetical protein | 46293_at | HG-U95B | AA059445 | | | | | | −3.9 |
| 22 | 8 | hypothetical protein | 46700_at | HG-U95B | W55956 | | | | | | |
| 23 | 8 | hypothetical protein | 47432_at | HG-U95B | N52554 | | | | | | |
| 24 | 8 | hypothetical protein | 48086_at | HG-U95B | AI948584 | | | | | | |
| 25 | 8 | hypothetical protein | 48539_at | HG-U95B | AI971023 | | | | | | |
| 26 | 8 | hypothetical protein | 49486 at | HG-U95B | W72331 | | | | | −8 | −3.2 |
| 27 | 8 | hypothetical protein | 52634_at | HG-U95B | AW025596 | | | | | | |
| 27 | 8 | hypothetical protein | 52637_g_at | HG-U95B | AW025596 | | | | | −4.8 | −3.1 |
| 28 | 8 | hypothetical protein | 55436_at | HG-U95B | AI669212 | | | | | | |
| 29 | 8 | hypothetical protein | 58531_g_at | HG-U95B | AL038964 | | | KIAA1547 | 15 | | |
| 30 | 8 | hypothetical protein | 59136_at | HG-U95B | AA779895 | | | | | | |

| | | | | | | | | |
|---|---|---|---|---|---|---|---|---|
| 15 | | −2.1 | −2.4 | −1.7 | hypothetical protein | Unpublished | 448 | 903 |
| | | | | | FLJ20373 | | | |
| 16 | −5.1 | −2.7 | −3.3 | −4.1 | hypothetical protein | Unpublished | 449 | 904 |
| | | | | | MGC14128 | | | |
| 17 | | −10.9 | −3.3 | −4.5 | hypothetical protein | Unpublished | 450 | 905 |
| | | | | | PR01489 | | | |
| 18 | −2.3 | −2.1 | −2.2 | −3 | Homo sapiens cDNA | Genome Res. 6 (9): 807-28 | 451 | — |
| | | | | | FLJ11971 fis, clone | 996 | | |
| | | | | | HEMBB1001208 | | | |
| 19 | −2.6 | | | −2.8 | hypothetical protein | Unpublished | 452 | — |
| | | | | | MGC16207 | | | |
| 20 | −3 | | −2.7 | −15.1 | Homo sapiens mRNA; cDNA | — | 453 | — |
| | | | | | DKFZp434H1235 (from clone | | | |
| | | | | | DKFZp434H1235); partial cds | | | |
| 21 | −3.7 | | −4.5 | −11.7 | Homo sapiens cDNA | Genome Res. 6 (9): 807-28 | 454 | — |
| | | | | | FLJ31097 fis, clone | 996 | | |
| | | | | | IMR321000210 | | | |
| 22 | −2.3 | −2.4 | | −2.7 | Homo sapiens mRNA; cDNA | Unpublished | 455 | — |
| | | | | | DKFZp586E1624 (from clone | | | |
| | | | | | DKFZp586E1624) | | | |
| 23 | −2.7 | | −2.3 | −1.7 | prostate cancer associated | Genome Res. 6 (9): 807-28 | 456 | — |
| | | | | | protein 1 | 996 | | |
| 24 | −3.9 | −6.2 | −15.6 | −13.1 | Homo sapiens cDNA | Unpublished | 457 | — |
| | | | | | FLJ30086 fis, clone | | | |
| | | | | | BNGH41000002, moderately | | | |
| | | | | | similar to | | | |
| | | | | | ADENYLOSUCCINATE | | | |
| | | | | | SYNTHETASE, MUSCLE | | | |
| | | | | | ISOZYME (EC 6.3.4.4) | | | |
| 25 | −2.1 | | | −5.3 | Homo sapiens cDNA: | Unpublished | 458 | — |
| | | | | | FLJ22539 fis, clone | | | |
| | | | | | HRC13227 | | | |
| 26 | −3.4 | −4.8 | −7.8 | −11.4 | ESTs | Unpublished | 459 | — |
| 27 | −2.5 | | −2 | −9 | Homo sapiens mRNA; cDNA | Unpublished | 460 | — |
| | | | | | DKFZp434H1235 (from clone | | | |
| | | | | | DKFZp434H1235); partial cds | | | |
| 27 | −5.7 | | −7.5 | −20.6 | Homo sapiens mRNA; cDNA | Unpublished | 460 | — |
| | | | | | DKFZp434H1235 (from clone | | | |
| | | | | | DKFZp434H1235); partial cds | | | |
| 28 | −2.5 | | −3.7 | −6.9 | protein phosphatase 2 | Unpublished | 461 | — |
| | | | | | (formerly 2A), regulatory | | | |
| | | | | | subunit B (PR 52), gamma | | | |
| | | | | | isoform | | | |
| 29 | −2.6 | | | −2.6 | KIAA1547 protein | Unpublished | 462 | — |
| 30 | −2.4 | | −3.2 | −6.6 | Homo sapiens cDNA | Unpublished | 463 | — |
| | | | | | FLJ30761 fis, clone | | | |
| | | | | | FEBRA2000538 | | | |

[0431] TABLE 30

| | | | | | | | | | | lot 1 | |
|---|---|---|---|---|---|---|---|---|---|---|---|
| | Cat_{—} | | | | | | | | | Day 3 | |
| | tag | category | Probe ID | Chip | accession | RefSeq | RefSeq | gene symbol | map location | AI | IMM |
| 31 | 10 | kinase | 50075_at | HG-U95B | R54939 | NM_024529 | NP_078805 | Clorf28 | 1q25 | | |
| 32 | 11 | matrix protein | 52576_s_at | HG-U95B | AW007426 | NM_012445 | NP_036577 | SPON2 | 4p16.3 | | |
| 33 | 12 | membrane protein | 44783_s_at | HG-U95B | R61374 | NM_012258 | NP_036390 | HEY1 | 8q21 | −6.2 | |

| | lot 1 | | lot 2 | | | | | |
|---|---|---|---|---|---|---|---|---|
| | Day 7 | | Day 3 | Day 7 | | | SEQ ID NO: | SEQ ID NO: |
| | AI | IMM | AI | AI | title | reference | (nucleotide seq.) | (amio acid seq.) |
| 31 | −3.5 | | | −5.7 | casein kinase 1, epsilon/ | Genomics 73: 211- | 464 | 906 |
| | | | | | chromosome 1 open reading | 222 (2001) | | |
| | | | | | frame 28 | | | |
| 32 | −3 | | −3.1 | −5.8 | spondin 2, extracellular | Genomics 61: 5-14 (1999) | 465 | 907 |
| | | | | | matrix protein | | | |
| 33 | −4.5 | −3.4 | −5.4 | −9.2 | hairy/enhancer-of-split | Biochem. Biophys. Res. | 466 | 908 |
| | | | | | related with YRPW motif 1 | Commun. 260: 459-465 | | |

[0432] TABLE 31

| | | | | | | | | | | lot 1 | |
|---|---|---|---|---|---|---|---|---|---|---|---|
| | Cat_{—} | | | | | | | | | Day 3 | |
| | tag | category | Probe ID | Chip | accession | RefSeq | RefSeq | gene symbol | map location | AI | IMM |
| 34 | 16 | oncogenesis | 46200_at | HG-U95B | AA742697 | NM_052863 | NP_443095 | HIN-1 | 5q35-qter | −5.4 | −3.1 |
| 35 | 17 | others | 42065_at | HG-U95B | H28581 | NM_138799 | NP_620154 | LOC129642 | 2p25.2 | | −2 |
| 36 | 17 | others | 58288_at | HG-U95B | W63676 | NM_138799 | NP_620154 | LOC129642 | 2p25.2 | −2.8 | |
| 37 | 17 | others | 43849_s_at | HG-U95B | AA622570 | NM_138805 | NP_620160 | LOC131177 | 3p21.1 | −5.2 | |
| 37 | 17 | others | 45394_s_at | HG-U95B | AA563933 | NM_138805 | NP_620160 | LOC131177 | 3p21.1 | −4.4 | |
| 38 | 17 | others | 46030_at | HG-U95B | AA428580 | NM_033197 | NP_149974 | MGC14597 | 20q11.21 | | −3.1 |
| 39 | 17 | others | 49616_at | HG-U95B | N27741 | NM_016583, | NP_057667 | LOC51297 | 20q11.2 | −9.1 | −4 |
| | | | | | | NM_130852 | NP_570913 | | | | |
| 40 | 17 | others | 51669_r_at | HG-U95B | AA583578 | NM_032899 | NP_116288 | MGC14128 | 8q24.13 | −2.8 | −2.2 |
| 41 | 20 | protein binding protein | 46271_at | HG-U95B | AI753747 | NM_004117 | NP_004108 | FKBP5 | 6p21.3-21.2 | | |
| 42 | 20 | protein binding protein | 54152_at | HG-U95B | AI026669 | NM_004095 | NP_004086 | EIF4EBP1 | 8p12 | −2.2 | |

| | lot 1 | | lot 2 | | | | | |
|---|---|---|---|---|---|---|---|---|
| | Day 7 | | Day 3 | Day 7 | | | SEQ ID NO: | SEQ ID NO: |
| | AI | IMM | AI | AI | title | reference | (nucleotide seq.) | (amino acid seq.) |
| 34 | −32.7 | −4 | −28 | −38.7 | putative cytokine high in | Proc. Natl. Acad. Sci. U.S.A. | 467 | 909 |
| | | | | | normal-1 | 98: 9796-9801 (2001) | | |
| 35 | −5.4 | −4.3 | −2.8 | −4.9 | Homo sapiens, Similar to | Unpublished | 468 | 910 |
| | | | | | RIKEN cDNA 2810049G06 | | | |
| | | | | | gene, clone MGC: 27266 | | | |
| | | | | | IMAGE: 4618779, mRNA, | | | |
| | | | | | complete cds | | | |
| 36 | −7.2 | −3.9 | −3 | −4.5 | Homo sapiens, Similar to | Unpublished | 468 | 910 |
| | | | | | RIKEN cDNA 2810049G06 | | | |
| | | | | | gene, clone MGC: 27266 | | | |
| | | | | | IMAGE: 4618779, mRNA, | | | |
| | | | | | complete cds | | | |
| 37 | −2.6 | | | −13.3 | Homo sapiens, Similar to | Unpublished | 469 | 911 |
| | | | | | RIKEN cDNA 1810037C20 | | | |
| | | | | | gene, clone MGC: 21481 | | | |
| | | | | | IMAGE: 3852062, mRNA, | | | |
| | | | | | complete cds | | | |
| 37 | −2.3 | | | −7.1 | Homo sapiens, Similar to | Unpublished | 469 | 911 |
| | | | | | RIKEN cDNA 1810037C20 | | | |
| | | | | | gene, clone MGC: 21481 | | | |
| | | | | | IMAGE: 3852062, mRNA, | | | |
| | | | | | complete cds | | | |
| 38 | −3.7 | | −8.5 | −5.4 | von Ebner minor salivary | Unpublished | 470 | 912 |
| | | | | | gland protein | | | |
| 39 | | −3.9 | −13.4 | −24.3 | LUNX protein; PLUNC | Biochim. Biophys. Acta | 471, 472 | 913, 914 |
| | | | | | (palate lung and nasal | 1493: 363-367 (2000) | | |
| | | | | | epithelium clone): tracheal | | | |
| | | | | | epithelium enriched protein | | | |
| 40 | −4.4 | −2.1 | −3 | −5 | ESTs, Moderately similar to | Unpublished | 473 | 915 |
| | | | | | alternatively spliced product | | | |
| | | | | | using exon 13A [H. sapiens] | | | |
| 41 | −2.3 | | | −21.2 | FK506-binding protein 5 | J. Biol. Chem. 268: 18365- | 474 | 916 |
| | | | | | | 18371 (1993) | | |
| 42 | | −7.3 | −2.3 | −2.7 | eukaryotic translation | Nature 371: 762-767 (1994) | 475 | 917 |
| | | | | | initiation factor 4E binding | | | |
| | | | | | protein 1 | | | |

[0433] TABLE 32

| | | | | | | | | | | lot 1 | |
|---|---|---|---|---|---|---|---|---|---|---|---|
| | Cat_{—} | | | | | | | gene | map | Day 3 | |
| | tag | category | Probe ID | Chip | accession | RefSeq | RefSeq | symbol | location | AI | IMM |
| 43 | 25 | structural protein | 44730_at | HG-U95B | AA788946 | NM_004370 | NP_004361 | COL12A1 | 6q12-q13 | | −2.9 |
| | | | | | | NM_080645 | NP_542376 | | | | |
| 44 | 26 | transcription factor | 42769_at | HG-U95B | N46441 | NM_003709 | NP_003700 | KLF7 | 2q34 | −3.2 | |
| 45 | 27 | transporter | 45826_at | HG-U95B | AA044844 | NM_014585 | NP_055400 | SLC11A3 | 2q32 | | −2.3 |
| 46 | 27 | transporter | 47575_g_at | HG-U95B | AA044244 | NM_002247 | NP_002238 | KCNMA1 | 10q22 | | |
| 46 | 27 | transporter | 53796_at | HG-U95B | AI819282 | NM_002247 | NP_002238 | KCNMA1 | 10q22 | | |
| 47 | 27 | transporter | 48048_at | HG-U95B | AI587292 | NM_006424 | NP_006415 | SLC34A2 | 4p15.3-p15.1 | −2.8 | |
| 48 | 27 | transporter | 51261_at | HG-U95B | AI052020 | NM_022553 | NP_072047 | BPGM | 7q31-q34 | −4 | |
| | | | | | | NM_080564 | NP_542131 | | | | |

| | lot 1 | | lot 2 | | | | SEQ ID NO: | SEQ ID NO: |
|---|---|---|---|---|---|---|---|---|
| | Day 7 | | Day 3 | Day 7 | | | (nucleotide | (amino acid |
| | AI | IMM | AI | AI | title | reference | seq.) | seq.) |
| 43 | −3.5 | | | −6.8 | collagen, type XII, alpha 1 | Proc. Natl. Acad. Sci. USA | 476, 477 | 918, 919 |
| | | | | | | 84: 6040-6044 (1987) | | |
| 44 | −2.3 | −3.7 | −5.7 | −4.7 | Kruppel-like factor 7 | J. Biol. Chem. 273 (43), | 478 | 920 |
| | | | | | (ubiquitous)/ESTs | 28229-28237 (1998) | | |
| 45 | −3.3 | | −2.5 | −3.8 | solute carrier family 11 | — | 479 | 921 |
| | | | | | proton-coupled divalent | | | |
| | | | | | metal ion transporters), | | | |
| | | | | | member 3 | | | |
| 46 | −5.2 | | −3.5 | −7 | potassium large conductance | Science 261: 221-224 (1993) | 480 | 922 |
| | | | | | calcium-activated channel, | | | |
| | | | | | subfamily M, alpha member 1 | | | |
| 46 | −2.8 | −3 | −4.8 | −6.1 | potassium large conductance | Science 261: 221-224 (1993) | 480 | 922 |
| | | | | | calcium-activated channel, | | | |
| | | | | | subfamily M, alpha member 1 | | | |
| 47 | −2 | | −4.3 | −4.3 | solute carrier family 34 | Biochem. Biophys. Res. | 481 | 923 |
| | | | | | (sodium phosphate), member | Commun. 258: 578-582 | | |
| | | | | | 2 | (1999) | | |
| 48 | −3.7 | | −2.5 | −2.4 | 2,3-bisphosphoglycerate | Genomics 52: 298-304 (1998) | 482, 483 | 924, 925 |
| | | | | | mutase | | | |

[0434] TABLE 33

| | | | | | | | | | | lot 1 | |
|---|---|---|---|---|---|---|---|---|---|---|---|
| | Cat_{—} | | | | | | | gene | map | Day 3 | |
| | tag | category | Probe ID | Chip | accession | RefSeq | RefSeq | symbol | location | AI | IMM |
| 49 | | | 44676_at | HG-U95B | AA045020 | | | | | | −3.4 |
| 50 | | | 45684_at | HG-U95B | AL040936 | | | | | −2.7 | |
| 51 | | | 46709_at | HG-U95B | AI807170 | | | SEMA4B | 15q25 | −2.8 | |
| 52 | | | 47578_at | HG-U95B | AA160156 | | | | | −2.4 | |
| 53 | | | 48999_at | HG-U95B | AA398155 | | | | | | |
| 54 | | | 49819_at | HG-U95B | AI432375 | | | | | −4.3 | |
| 55 | | | 49985_at | HG-U95B | AI917602 | | | | | −2.3 | |
| 56 | | | 52384_s_at | HG-U95B | AI984780 | | | | | | −2.8 |
| 57 | | | 53747_at | HG-U95B | AA422178 | | | | | −5.3 | |
| 58 | | | 57282_at | HG-U95B | AA400080 | | | | | | |
| 59 | | | 58528_s_at | HG-U95B | AI760772 | | | | | −2.3 | |
| 60 | | | 59109_at | HG-U95B | AA442232 | | | | | | |
| 61 | | | 59567_at | HG-U95B | AA456099 | | | | | −2 | −2 |

| | lot 1 | | lot 2 | | | | SEQ ID NO: | SEQ ID NO: |
|---|---|---|---|---|---|---|---|---|
| | Day 7 | | Day 3 | Day 7 | | | (nucleotide | (amino acid |
| | AI | IMM | AI | AI | title | reference | seq.) | seq.) |
| 49 | −2.9 | | −5.7 | −7.1 | hypothetical | Genome Res. 6 | 484 | — |
| | | | | | gene supported | (9): 807-28 | | |
| | | | | | by AL449243 | 1996 | | |
| 50 | −2.3 | | | −4.5 | ESTs | Unpublished | 485 | — |
| 51 | −3.6 | −2.2 | | −2.5 | sema domain, | Unpublished | 486 | — |
| | | | | | immunoglobulin | | | |
| | | | | | domain (Ig), | | | |
| | | | | | transmembrane | | | |
| | | | | | domain (TM) | | | |
| | | | | | and short cyto- | | | |
| | | | | | plasmic domain, | | | |
| | | | | | (semaphorin) 4B | | | |
| 52 | −4.2 | | −2.3 | −3.1 | ESTs | Genome Res. 6 | 487 | — |
| | | | | | | (9): 807-28 | | |
| | | | | | | 1996 | | |
| 53 | −2 | | | −3.8 | ESTs | Unpublished | 488 | — |
| 54 | −4.5 | −6.3 | −2.6 | −5 | ESTs | Unpublished | 489 | — |
| 55 | | | −2.4 | −4.1 | ESTs | Unpublished | 490 | — |
| 56 | −2.5 | | −5.3 | −4 | ESTs | Unpublished | 491 | — |
| 57 | −2.8 | | | −32.2 | Homo sapiens | Unpublished | 492 | — |
| | | | | | cDNA: FLJ21763 | | | |
| | | | | | fis, clone | | | |
| | | | | | COLF6967 | | | |
| 58 | −4.2 | | | −4.1 | ESTs | Unpublished | 493 | — |
| 59 | | | −2 | | general trans- | Unpublished | 494 | — |
| | | | | | cription factor | | | |
| | | | | | IIH, polypeptide | | | |
| | | | | | 3 (34 kD | | | |
| | | | | | subunit) | | | |
| 60 | −2.3 | | | −2.2 | ESTs | Unpublished | 495 | — |
| 61 | −2.2 | −2.3 | −2.1 | −3.5 | ESTs | Unpublished | 496 | — |

[0435] TABLE 34

| | | | | | | | | | | lot 1 | |
|---|---|---|---|---|---|---|---|---|---|---|---|
| | Cat_{—} | | | | | | | gene | map | Day 3 | |
| | tag | category | Probe ID | Chip | accession | RefSeq | RefSeq | symbol | location | AI | IMM |
| 1 | 3 | cell cycles | 57044_s_at | HG-U95C | AW015590 | NM_014059 | NP_054778 | RGC32 | 13q13.3 | −2.7 | |
| 2 | 4 | chemokine | 65823_at | HG-U95C | N45415 | NM_004887 | NP_004878 | SCYB14 | 5q31 | −4.1 | |
| 3 | 8 | hypothetical | 48793_at | HG-U95C | AA150356 | NM_014899 | NP_055714 | KIAA0878 | 5q15 | | |
| | | protein | | | | | | | | | |
| 4 | 8 | hypothetical | 49196_at | HG-U95C | N63044 | NM_017640 | NP_060110 | FLJ20048 | 6p22.1 | −2.4 | |
| | | protein | | | | | | | | | |
| 5 | 8 | hypothetical | 54791_at | HG-U95C | AI620463 | NM_032323 | NP_115699 | MGC13102 | 1q21.3 | −6.5 | |
| | | protein | | | | | | | | | |
| 6 | 8 | hypothetical | 56234_r_at | HG-U95C | AA053401 | | | | | | |
| | | protein | | | | | | | | | |
| 7 | 8 | hypothetical | 60939_i_at | HG-U95C | AA151265 | | | | | −2.5 | |
| | | protein | | | | | | | | | |
| 7 | 8 | hypothetical | 60940_r_at | HG-U95C | AA151265 | | | | | | |
| | | protein | | | | | | | | | |
| 8 | 8 | hypothetical | 62490_f_at | HG-U95C | AI207832 | NM_018050 | NP_060520 | FLJ10298 | 12p13.2 | −3.7 | |
| | | protein | | | | | | | | | |
| 9 | 8 | hypothetical | 62972_at | HG-U95C | W56118 | | | KIAA1376 | 5q14.3 | | −2.5 |
| | | protein | | | | | | | | | |
| 9 | 8 | hypothetical | 64047_at | HG-U95C | AA587245 | | | KIAA1376 | 5q14.3 | | |
| | | protein | | | | | | | | | |
| 10 | 8 | hypothetical | 63150_at | HG-U95C | T52027 | | | | | | |
| | | protein | | | | | | | | | |
| 11 | 8 | hypothetical | 63342_at | HG-U95C | AA150254 | NM_016619 | NP_057703 | LOC51316 | 4q21.21- | −2 | |
| | | protein | | | | | | | q21.23 | | |
| 12 | 8 | hypothetical | 64285_at | HG-U95C | AI050855 | | — | | | −3.6 | −2.6 |
| | | protein | | | | | | | | | |
| 13 | 8 | hypothetical | 64345_s_at | HG-U95C | AW003533 | | | K1IAA1102 | 4p13 | −2.7 | |
| | | protein | | | | | | | | | |
| 14 | 8 | hypothetical | 65626_at | HG-U95C | AA059458 | | | | | −2.3 | −4.5 |
| | | protein | | | | | | | | | |
| 15 | 8 | hypothetical | 65876_at | HG-U95C | R45447 | | | MGC16207 | 11q23.3 | | −4.5 |
| | | protein | | | | | | | | | |
| 16 | 10 | kinase | 61873_at | HG-U95C | AI741715 | NM_000167 | NP_000158 | GK | Xp21.3 | | |
| 17 | 12 | membrane | 63958_at | HG-U95C | AI583077 | MM_005672 | NP_005663 | PSCA | 8q24.2 | −9.8 | |
| | | protein | | | | | | | | | |
| 18 | 17 | others | 55440_at | HG-U95C | AI828943 | NM_016583 | NP_057667 | LOC51297 | 20q11.2 | −57.3 | −10.5 |
| | | | | | | NM_130852 | NP_570913 | | | | |
| 18 | 17 | others | 55442_g_at | HG-U95C | AI828943 | NM_016583 | NP_057667 | LOC51297 | 20q11.2 | −14 | −4.9 |
| | | | | | | NM_130852 | NP_570913 | | | | |
| 19 | 17 | others | 63813_at | HG-U95C | AL119488 | NM_016025 | NP_057109 | DREV1 | 16p13-p12 | −2 | |
| 20 | 25 | structural | 62998_at | HG-U95C | AI831452 | NM_005555 | NP_005546 | KRT6B | 12q12-p13 | −3.4 | −3.5 |
| | | protein | | | | | | | | | |
| 21 | 26 | transcription | 64071_at | HG-U95C | N25612 | NM_018660 | NP_061130 | LOC55893 | 8p12 | | −2 |
| | | factor | | | | | | | | | |
| 22 | 26 | transcription | 64121_at | HG-U95C | Z78373 | NM_006530 | NP_006521 | GAS41 | 12q13-q15 | | |
| | | factor | | | | | | | | | |
| 23 | | | 64163_at | HG-U95C | AI798733 | | | | | | |
| 24 | | | 65699_at | HG-U95C | AA203423 | | | | | | |

| | lot 1 | | lot 2 | | | | SEQ ID NO: | SEQ ID NO: |
|---|---|---|---|---|---|---|---|---|
| | Day 7 | | Day 3 | Day 7 | | | (nucleotide | (amino acid |
| | AI | IMM | AI | AI | title | reference | seq.) | seq.) |
| 1 | | | −2.2 | −2.4 | RGC32 protein | Unpublished | 497 | 926 |
| 2 | | | −2.1 | −2.5 | small inducible cytokine | Biochem. Biophys. Res. | 498 | 927 |
| | | | | | subfamily B (Cys-X-Cys), | Commun. 255: 703-706 | | |
| | | | | | member 14 (BRAK) | (1999) | | |
| 3 | −2.8 | −2.4 | −2.1 | −2 | KIAA0878 protein | Unpublished | 499 | 928 |
| 4 | −4.3 | | −2.3 | −2 | hypothetical protein FLJ20048 | Unpublished | 500 | 929 |
| 5 | −3.9 | | −2.1 | | hypothetical protein | Unpublished | 501 | 930 |
| | | | | | MGC13102 | | | |
| 6 | −3.5 | −5.7 | | −3.2 | | Genome Res. 6 (9): 807-28 | 502 | — |
| | | | | | | 1996 | | |
| 7 | −2.6 | | | −2.7 | ESTs | Genome Res. 6 (9): 807-28 | 503 | — |
| | | | | | | 1996 | | |
| 7 | −5.9 | | | −11.6 | ESTs | Genome Res. 6 (9): 807-28 | 503 | — |
| | | | | | | 1996 | | |
| 8 | −4.5 | | −3.4 | −5.4 | hypothetical protein FLJ10298 | Unpublished | 504 | 931 |
| 9 | −2.2 | | | −3.9 | KIAA1376 protein | Unpublished | 505 | — |
| 9 | −4 | | | −4.2 | KIAA1376 protein | Unpublished | 506 | — |
| 10 | −2.9 | 2.5 | | −3.5 | ESTs, Weakly similar to I38022 | Genome Res. 6 (9): 807-28 | 507 | — |
| | | | | | hypothetical protein | 1996 | | |
| | | | | | [H. sapiens] | | | |
| 11 | −2.4 | | | −5 | hypothetical protein | Unpublished | 508 | 932 |
| 12 | −3.6 | −3.7 | −2.9 | | ESTs/hypothetical protein | — | 509 | — |
| | | | | | FLJ20151 | | | |
| 13 | | −5.6 | −3.2 | −4.9 | KIAA1102 protein | Unpublished | 510 | — |
| 14 | −3.4 | −3.1 | −5.8 | −4.6 | Homo sapiens cDNA FLJ11041 | Genome Res. 6 (9): 807-28 | 511 | — |
| | | | | | fis. clone PLACE1004405 | 1996 | | |
| 15 | −4 | −2.3 | | −3.4 | hypothetical protein | Unpublished | 512 | — |
| | | | | | MGC16207 | | | |
| 16 | −2.7 | | | −2.1 | glycerol kinase | Am. J. Med. Genet. 36: 23- | 513 | 933 |
| | | | | | | 28 (1990) | | |
| 17 | −6.5 | | −5.5 | −9.8 | prostate stem cell antigen | Unpublished | 514 | 934 |
| 18 | −60.6 | −3.7 | −10.8 | −33.7 | LUNX protein: PLUNC (palate | Biochim. Biophys. Acta | 515, 516 | 935, 936 |
| | | | | | lung and nasal epithelium | 1493: 363-367 (2000) | | |
| | | | | | clone): trachel epithelium | | | |
| | | | | | enriched protein | | | |
| 18 | −181.3 | −12.8 | −14.4 | −33.7 | LUNX protein: PLUNC (palate | Biochim. Biophys. Acta | 515, 516 | 935, 936 |
| | | | | | lung and nasal epithelium | 1493: 363-367 (2000) | | |
| | | | | | clone); tracheal epithelium | | | |
| | | | | | enriched protein | | | |
| 19 | | | −2.1 | −2.1 | CGI-81 protein | Unpublished | 517 | 937 |
| 20 | −5.6 | −2.5 | | −5.5 | keratin 6B | Proc. Natl. Acad. Sci. U.S.A. | 518 | 938 |
| | | | | | | 82: 4683-4687 (1985) | | |
| 21 | −3.5 | | | −2.6 | papillomavirus regulatory factor | Unpublished | 519 | 939 |
| | | | | | PRF-1 | | | |
| 22 | −2 | | | −2 | glioma-amplified sequence-41 | Hum. Mol. Genet. 5: 1817- | 520 | 940 |
| | | | | | | 1822 (1997) | | |
| 23 | −3.6 | −2.3 | −2.3 | −3.3 | Homo sapiens clone 25194 | Unpublished | 521 | — |
| | | | | | mRNA sequence | | | |
| 24 | −2.6 | | | −4.7 | hypothetical protein | Unpublished | 522 | — |

[0436] TABLE 35

| | | | | | | | | | | lot 1 | |
|---|---|---|---|---|---|---|---|---|---|---|---|
| | Cat_{—} | | | | | | | gene | map | Day 3 | |
| | tag | category | Probe ID | Chip | accession | RefSeq | RefSeq | symbol | location | AI | IMM |
| 1 | 2 | cell adhesion | 79615_at | HG-U95D | AI188613 | NM_001941 | NP_001932 | DSC3 | 18q12.1 | | |
| 2 | 5 | cytokine related | 68339_at | HG-U95D | AI624028 | NM_000358 | NP_000349 | TGFBI | 5q31 | −2.9 | |
| 3 | 5 | cytokine related | 74633_at | HG-U95D | AI986430 | NM_006291 | NP_006282 | TNFAIP2 | 14q32 | | |
| 4 | 7 | enzyme | 74557_s_at | HG-U95D | AI739473 | NM_014762 | NP_055577 | DHCR24 | 1p33-p31.1 | | |
| 5 | 17 | others | 82231_at | HG-U95D | AA367838 | NM_133639 | NP_598378 | ARHV | 15q13.3 | −2 | |
| 6 | 22 | proteinase inhibitor | 75248_at | HG-U95D | AI979262 | NM_001085 | NP_001076 | SERPINA3 | 14q32.1 | −4.8 | |
| 7 | | | 69289_at | HG-U95D | AA079839 | | | | | | |
| 8 | | | 70124_at | HG-U95D | AI770116 | | | | | | |
| 9 | | | 72604_at | HG-U95D | AI468340 | | | | | −2 | −2.2 |
| 10 | | | 79520_at | HG-U95D | AW022213 | | | | | | |
| 11 | | | 83076_at | HG-U95D | AI740855 | | | | | | |
| 12 | | | 83988_at | HG-U95D | AA428312 | | | | | | |
| 13 | | | 84270_at | HG-U95D | AI829641 | | | | | −5.1 | |
| 14 | | | 84903_f_at | HG-U95D | AI264299 | | | | | −3.1 | |
| 15 | | | 87539_i_at | HG-U95D | AA369887 | | | | | | |

| | lot 1 | | lot 2 | | | | SEQ ID NO: | SEQ ID NO: |
|---|---|---|---|---|---|---|---|---|
| | Day 7 | | Day 3 | Day 7 | | | (nucleotide | (amino acid |
| | AI | IMM | AI | AI | title | reference | seq.) | seq.) |
| 1 | −2.4 | −4 | | −2.4 | desmocollin 3 | Genomics 10: 640-645 (1991) | 523 | 941 |
| 2 | −4.2 | −3.2 | −2.8 | −4.9 | transforming growth factor, | DNA Cell Biol. 11 (7), 511-522 | 524 | 942 |
| | | | | | beta-induced, 68 kD | (1992) | | |
| 3 | −4.6 | | −2.2 | −4.2 | tumor necrosis factor, alpha- | J. Immunol. 148: 3302- | 525 | 943 |
| | | | | | induced protein 2 | 3312 (1992) | | |
| 4 | −2 | | −2.1 | −6.8 | 24-dehydrocholesterol | DNA Res. 1: 47-56 (1994) | 526 | 944 |
| | | | | | reductase | | | |
| 5 | −2.7 | | | −4 | ras homolog gene family, | Curr. Biol. 8: 1125-1128 (1998) | 527 | 945 |
| | | | | | member V (ARHV) | | | |
| 6 | −24.4 | −16.3 | −35.8 | −46.4 | serine (or cysteine) | Biochem. Biophys. Res. | 528 | 946 |
| | | | | | proteinase inhibitor, clade A | Commun. 111: 438-443 (1983) | | |
| | | | | | (alpha-1 antiproteinase, | | | |
| | | | | | antitrypsin), member 3 | | | |
| 7 | −2.2 | | −2 | −2.3 | ESTs | | 529 | — |
| 8 | −2.3 | −2.1 | −2.6 | −5.1 | ESTs | | 530 | — |
| 9 | | | −2.4 | | ESTs | | 531 | — |
| 10 | −2.6 | | −2.9 | −5.4 | ESTs | | 532 | — |
| 11 | −2 | | −2.7 | −3.5 | ESTs | | 533 | — |
| 12 | −2 | | | −5.4 | ESTs | | 534 | — |
| 13 | −3.3 | 11.7 | −24.1 | −39.5 | ESTs, Weakly similar to | | 535 | — |
| | | | | | T21338 hypothetical protein | | | |
| | | | | | F25D7.4 - Caenorhabditis | | | |
| | | | | | elegans [C. elegans] | | | |
| 14 | | | −10.4 | −5.9 | ESTs | | 536 | — |
| 15 | −3.6 | | −3.4 | −2.6 | ESTs | | 537 | — |

[0437] TABLE 36

| | | | | | | | | | | lot 1 | |
|---|---|---|---|---|---|---|---|---|---|---|---|
| | Cat_{—} | | | | | | | gene | map | Day 3 | |
| | tag | category | Probe ID | Chip | accession | RefSeq | RefSeq | symbol | location | AI | IMM |
| 1 | 1 | apoptosis | 80667_f_at | HG-U95E | AW006485 | NM_002305 | NP_002296 | LGALS1 | 22q13.1 | | |
| 2 | 2 | cell adhesion | 88239_i_at | HG-U95E | AI656062 | NM_001843 | NP_001834 | CNTN1 | 12q11-q12 | | |
| 3 | 7 | enzyme | 81926_at | HG-U95E | AI685069 | NM_013358 | NP_037490 | PADI1 | 1p36.13 | −6.1 | |
| 4 | 7 | enzyme | 89741_at | HG-U95E | AL120518 | NM_018414 | NP_060884 | ST6GalNAcI | 17q25.3 | −2.5 | |
| 5 | 8 | hypothetical protein | 69750_at | HG-U95E | AI685410 | NM_018192 | NP_060662 | FLJ10718 | 3q29 | | |
| 6 | 8 | hypothetical protein | 77516_r_at | HG-U95E | AI983995 | | | DKFZP434I1735 | 14 | | |
| 7 | 8 | hypothetical protein | 86024_at | HG-U95E | AI971029 | NM_032899 | NP_116288 | MGC14128 | 8q24.13 | | |
| 7 | 8 | hypothetical protein | 89360_at | HG-U95E | AA630327 | NM_032899 | NP_116288 | MGC14128 | 8q24.13 | −2.1 | −2.6 |
| 8 | 27 | transporter | 91275_at | HG-U95E | AI149637 | NM_001651 | NP_001642 | AQP5 | 12q13 | −7.7 | −3.8 |
| 9 | | | 76769_at | HG-U95E | AI758223 | | | | | −3.6 | −2.1 |
| 10 | | | 88716_at | HG-U95E | AI927079 | | | | | −2.7 | |

| | lot 1 | | lot 2 | | | | SEQ ID NO: | SEQ ID NO: |
|---|---|---|---|---|---|---|---|---|
| | Day 7 | | Day 3 | Day 7 | | | (nucleotide | (amino acid |
| | AI | IMM | AI | AI | title | reference | seq.) | seq.) |
| 1 | −7.2 | −5.2 | −2.5 | −8.2 | lectin, galactoside-binding, | Proc. Natl. Acad. Sci. U.S.A. | 538 | 947 |
| | | | | | soluble, 1 (galectin 1) | 83: 7603-7607 (1986) | | |
| 2 | −2 | −2.7 | −3.8 | −3.3 | contactin 1 | Genomes 21: 571-582 | 539 | 948 |
| 3 | −6.1 | −7.6 | −6.7 | −6.8 | peptidylarginine deiminase | Unpublished: - ( ) | 540 | 949 |
| | | | | | type I | | | |
| 4 | −2.4 | −4.3 | −8.8 | −8.4 | GalNAc alpha-2,6- | J. Biol. Chem. 274: 11958- | 541 | 950 |
| | | | | | siatyltransferase I, long form | 11967 (1999) | | |
| 5 | −3 | −4.7 | | −3.6 | hypothetical protein | Unpublished | 542 | 951 |
| | | | | | FLJ10718 | | | |
| 6 | −2 | | | −2.7 | DKFZP434I1735 protein | | 543 | — |
| 7 | −4 | −2.9 | −2.4 | −2.8 | ESTs. Moderately similar to | Unpublished | 544 | 952 |
| | | | | | alternatively spliced product | | | |
| | | | | | using exon 13A [H. sapiens]/ | | | |
| | | | | | hypothetical protein | | | |
| | | | | | MGC14128 | | | |
| 7 | −3.8 | −2.9 | | −4 | ESTs, Moderately similar to | Unpublished | 544 | 952 |
| | | | | | alternatively spliced product | | | |
| | | | | | using exon 13A [H. sapiens]/ | | | |
| | | | | | hypothetical protein | | | |
| | | | | | MGC14128 | | | |
| 8 | −3.7 | | −14.3 | −7.7 | aquaporin 5 | J. Biol. Chem. 271: 8599-8604 | 545 | 953 |
| | | | | | | (1996) | | |
| 9 | −14.8 | −15.7 | −9.6 | | ESTs | | 546 | — |
| 10 | −12.9 | −10.7 | −7 | −18.5 | ESTs | | 547 | — |

[0438] RefSeq gene sequences on the chips of HG-U95A to HG-U95E and the amino acid sequences thereof, and, if RefSeq genes are unavailable, EST sequences, are shown in the Sequence Listing.

2. Pendrin Gene

[0439] Among the sequences whose expression levels change in response to IL-13 stimulation in both Lots 1 and 2 in the respiratory epithelial cells cultured by the AI method, the pendrin gene (RefSeq: NM_{—}000441 and NM_{—}000432; SEQ ID NOs: 2 and 3) was selected by the analysis described above, as a gene whose expression level was increased on day 3 and day 7 by a factor of ten or more. The Pendrin gene belongs to the category of transporters. In respiratory epithelial cells cultured with the IMM method, the expression level of the pendrin gene was also found to be increased by a factor of 20 or more in response to IL-13 stimulation on day 3 and day 7 in both Lots 1 and 2.

[0440] This gene is closely associated with allergies induced by IL-13 stimulation. The analysis result for the pendrin gene obtained using HG-U95A chip is shown in Table 37.

TABLE 37

| | | Lot 1 | | | | Lot 2 | |
|---|---|---|---|---|---|---|---|
| | | Day | Day | Day | Day | Day | Day |
| Probe set | Acces- | 3 | 7 | 3 | 7 | 3 | 7 |
| ID | sion | AI | IMM | AI | IMM | AI | AI |
| 36376_at | AF030880 | 18.8 | 25.6 | 20.1 | 28.5 | 118.3 | 58.2 |

[0441] The PDS gene is a causative gene of the hereditary disease Pendred's syndrome, which is characterized by congenital deafness and goiters (Everett L. A. et al., Nat. Genet. 17: 411-22 (1997)). The gene was reported as a sulfuric acid transporter, because of the presence of a sulfuric acid transporter domain. However, after the report, the protein has been studied as a protein that transports other anions such as Cl⁻ and I⁻ (Scott D. A. et al., Nat. Genet. 21(4): 440-3 (1999); Scott D. A. and Karniski L. P., Am. J. Physiol. 278: C207-11 (2000)). Pendrin is an 86-kDa transmembrane protein that consists of 780 amino acid residues and has a 12 transmembrane domain. In humans, the gene has been found to be expressed in the inner ear and thyroid gland at high levels, and in the kidney, endometrium, and placenta at lower levels (Rayaux I. E. et al., Endocrinology 141: 839-45 (2000); Bidart J. M. et al., J. Clin. Endocrinol. Metab. 85: 2028-33 (2000)). On the other hand, in mice and rats, the gene is expressed in the kidney at a high level, and the expression is also detectable in the endometrium and placenta. The PDS gene encoding pendrin has been mapped on chromosome 7q31, the location of the DFNB4 locus. The causative gene of congenital colon disorder, DRA (SLC26A3; down-regulated in colonic adenoma), has been mapped immediately downstream of the PDS gene in an inverse configuration.

[0442] The DRA gene encodes a sulfur transporter that is expressed at high levels in the colon and mucous membranes, and the transporter is structurally very similar to pendrin. Another gene exhibiting a high similarity to the PDS gene is DTDST (SLC26A2; diastrophic dysplasia) that is a causative gene of diastrophic dysplasia, which has been mapped on chromosome 5q32-q33.1. DTDST is also known to encode a protein functioning as a sulfur transporter. PDS gene knockout mice are deaf and are affected with vestibular function disorders. The inner ears are normal in 15-day olds or younger fetuses, but enlargement, sensory cell deformities, and otocranial deformities are developed after that (Everett L. A. et al., Hum. Mol. Genet. 10(2): 153-61 (2001)).

### EXAMPLE 6

### Determination of the Expression Levels of Candidate Genes in bronchial epithelial cells Cultured by the AI Method or the IMM Method

[0443] Quantitative PCR assays were further performed with ABI 7700 using two batches of epithelial cells cultured respectively by the AI method and the IMM method described in Example 1 to quantitatively determine the expression level of the pendrin gene selected in Example 5. The primers and TaqMan probe used in the assays with ABI 7700 were designed based on the information on the sequence of the pendrin gene utilizing Primer Express (PE Biosystems). The 5′ and 3′ ends of the TaqMan probe were labeled with FAM (6-carboxy-fluorescein) and TAMRA (6-carboxy-N,N,N′,N′-tetramethylrhodamine), respectively. The sequences of oligonucleotides of the forward primer (F), reverse primer (R), and TaqMan probe (TP) for the pendrin gene are shown below. The GenBank accession number corresponding to the nucleotide sequence of each marker gene is shown in parenthesis after the name.

[0444] Pendrin (AF030880)

| | | |
|---|---|---|
| F: | TTTGCCTCCTGAACTTCCACC | (SEQ ID NO: 4) |
| R: | CCTACTGACACTGCAATAGCATAAGC | (SEQ ID NO: 5) |
| TP: | cttgttctcggagatgctggctgcat | (SEQ ID NO: 6) |

[0445] Total RNA extracted by the aforementioned method was treated with DNase (Nippon Gene). Then, cDNA, which was reverse transcribed using random hexamer (GIBCO BRL) as primer, was used as a template. For a standard curve to calculate the number of copies, a plasmid clone containing a nucleotide sequence region that is amplified by both primers was prepared for each of the genes, and this was diluted stepwise to be used as template for carrying out the reaction. The composition of reaction solution for monitoring PCR amplification is shown in Table 38.

TABLE 38
Composition of reaction in ABI-PRISM 7700 (Amount per well)

| | | |
|---|---|---|
| Sterilized distilled water | 23.75 | (μL) |
| 10× TaqMan buffer A | 5 | |
| 25 mM MgCl₂ | 7 | |
| dATP(10 mM) | 1.0 | |
| dCTP(10 mM) | 1.0 | |
| dGTP(10 mM) | 1.0 | |
| dUTP(20 mM) | 1.0 | |
| Forward Primer (10 μM) | 1.0 | |
| Reverse Primer (10 μM) | 1.0 | |
| TaqMan probe (2.0 μM) | 2.5 | |
| AmpliTaq Gold (5 U/μL) | 0.25 | |
| AmpErase UNG (1 U/μL) | 0.5 | |
| Template solution | 5 | |
| Total | 50 | |

[0446] Additionally, to correct the differences of cDNA concentration in the sample, a similar quantitative analysis was performed for β-actin gene and glyceraldehyde-3-phosphate dehydrogenase (GAPDH) gene as internal standards for correction. By correcting based on the number of copies of these genes, the number of copies of the genes of interest was calculated.

[0447] Primers and probes for measuring β-actin or GAPDH were designed from Primer Express (Applied Biosystems) based on the genetic information of each gene. The nucleotide sequences are as shown below. The β-actin-corrected expression levels (copy/5 ng RNA) for marker genes are shown in FIGS. 3.
[0448] β-actin forward primer (SEQ ID NO: 7)
[0449] TCA CCC ACA CTG TGC CCA TCT ACG A
[0450] β-actin reverse primer (SEQ ID NO: 8)
[0451] CAG CGG AAC CGC TCA TTG CCA ATG G
[0452] β-actin TaqMan probe (SEQ ID NO: 9)
[0453] (FAM)ATGCCCTCCCCCATGCCATCCTGCGT(TAMRA)-3′
[0454] GAPDH forward primer (SEQ ID NO: 10)
[0455] GAAGGTGAAGGTCGGAGT
[0456] GAPDH reverse primer (SEQ ID NO: 11)
[0457] GAAGATGGTGATGGGATTTC
[0458] GAPDH TaqMan probe (SEQ ID NO: 12)
[0459] (FAM)CAAGCTTCCCGTTCTCAGCC(TAMRA)-3′
[0460] FAM: 6-carboxy-fluorescein
[0461] TAMRA: 6-carboxy-N,N,N′,N′-tetramethylrhodamine

[0462] As a result of quantitative PCR, the expression level of the pendrin gene (selected in Example 5) in the respiratory tract epithelial cells was elevated by hundred folds or more as a result of IL-13 stimulation in respiratory tract epithelial cells when cultured according to the AI method or IMM method. Based on these results, it was presumed that the expression level of the marker gene was elevated in respiratory tract epithelial cells in response to IL-13.

[0463] The marker genes of this invention show common behavior among different lots of bronchial epithelial cells by IL-13 stimulation known to have a close relationship to allergic reactions. Therefore, the marker genes of this invention are thought to be important genes that regulate the progression of allergic reactions.

### EXAMPLE 7

### RNA recovery from the Lung of OVA antigen-exposed bronchial Hypersensitivity Mouse Model

[0464] The OVA antigen-exposed bronchial hypersensitivity model has been reported as a bronchial asthma model. 50 μg OVA and 1 mg aluminum hydroxide (an adjuvant) were injected into the peritoneal cavity of Balb/c mice (male, seven-week old), and after 10 days the mice was sensitized with OVA under the same conditions. Then, after 10 days, 1% OVA was given by inhalation using the Ultra-nebulizer model UN701 (Azwell (Co., Ltd.)) for 30 minutes every four days three times in total. Enhanced bronchial hypersensitivity was monitored by detecting the respiratory constriction caused by acetylcholine (6.25-2000 μg/kg) using an artificial respirator (model 131, New England Medical Instruments Inc.) 24 hours after the final antigen inhalation (Nagai H. et al, Int Arch Allergy Immunol; 108: 189-195, 1995). Bronchial hypersensitivity can be induced by this treatment.

[0465] Variations in the expression level of the mouse pendrin gene were studied using RNA from the lungs of this model.

[0466] The test was conducted using the following four groups: OVA antigen-exposed bronchial hypersensitivity group (called the “S-OVA group”; N=7)); and three control groups: untreated group (called the “naive group”;(N=6)); physiological saline-inhaled group to which the OVA antigen was given twice for immunization and physiological saline was given by inhalation (called the “S-Sal group”; (N=6)); and the Prednisolone-administered group, to which Prednisolone was given by inhalation 10 times in total from the day before antigen inhalation until the final antigen inhalation, and the development of bronchial hypersensitivity was suppressed by giving 5 mg/kg Prednisolone orally (called the “Pred-group”;(N=7)).

[0467] The left lungs were removed 24 hours after the antigen was inhaled three times, by which time, the symptoms of bronchial hypersensitivity can be seen. The lung tissues were dissolved in 2 ml of Isogen (Nippon Gene; Wako Pure Chemical Industries) and immediately crushed with the homogenizer DIAX100 (Heidolph). RNA was isolated from 1 ml of this solution according to the protocol attached to Isogen. Chloroform was added to the solution. After the mixture was stirred and centrifuged, the aqueous layer was recovered. Then, isopropanol was added. After the mixture was stirred and centrifuged, the precipitated total RNA was collected. Total RNAs (approximately 20-60 μg) were extracted from the samples of the four groups (N=26) described above.

### EXAMPLE 8

### Determination of the Expression Level of pendrin Gene in the Lung of OVA antigen-exposed bronchial Hypersensitivity Model

[0468] Quantitative PCR assay was performed with ABI 7700 using the lung RNAs described in Example 8 to quantitatively determine the expression level of the mouse pendrin gene (RefSeq: NM_{—}011867, NM_{—}035997, SEQ ID NO: 13/DNA, and SEQ ID NO: 14/amino acid sequence). The primers and TaqMan probe used in the assay with ABI 7700 were designed based on the information on the sequence of the pendrin gene utilizing Primer Express (Applied Bio Systems). The 5′ and 3′ ends of the TaqMan probe were labeled with FAM (6-carboxy-fluorescein) and TAMRA (6-carboxy-N,N,N′,N′-tetramethylrhodamine), respectively. The sequences of oligonucleotides of the forward primer (F), reverse primer (R) and TaqMan probe (TP) for the pendrin gene are shown below. The GenBank accession number corresponding to the nucleotide sequence of the mouse pendrin gene is shown in parenthesis after the name.

mouse pendrin (AF167411)

| | | |
|---|---|---|
| F: | GGTTCTTGCCTCCTGTCCTG | (SEQ ID NO: 15) |
| R: | AATGGAAAAGGATGCAGCCA | (SEQ ID NO: 16) |

[0469] TP: catctgtgggcctgttttcggacatg (SEQ ID NO: 17)

[0470] Total RNA extracted by the aforementioned method was treated with DNase (Nippon Gene). Then, cDNA, which was reverse transcribed using random hexamer (GIBCO BRL) as primer, was used as a template. For a standard curve to calculate the number of copies, a plasmid clone comprising a nucleotide sequence region that is amplified by both primers was prepared for each of the genes, and this was diluted stepwise to be used as a template for carrying out the reaction. The composition of the reaction solution for monitoring PCR amplification is shown in Table 39.

TABLE 39
Composition of the reaction solution
in ABI-PRISM 7700 (Amount per well)

| | | |
|---|---|---|
| Sterilized distilled water | 23.75 | (μL) |
| 10× TaqMan buffer A | 5 | |
| 25 mM MgCl₂ | 7 | |
| dATP(10 mM) | 1.0 | |
| dCTP(10 mM) | 1.0 | |
| dGTP(10 mM) | 1.0 | |
| dUTP(20 mM) | 1.0 | |
| Forward Primer (10 (μM) | 1.0 | |
| Reverse Primer (10 (μM) | 1.0 | |
| TaqMan probe (2.0 μM) | 2.5 | |
| AmpliTaq Gold (5 U/μL) | 0.25 | |
| AmpErase UNG (1 U/μL) | 0.5 | |
| Template solution | 5 | |
| Total | 50 | |

[0471] Additionally, to correct the differences of cDNA concentration in the sample, a similar quantitative analysis was performed for mouse β-actin gene and mouse glyceraldehyde-3-phosphate dehydrogenase (GAPDH) gene as internal standards for correction. By correcting based on the number of copies of these genes, the number of copies of the genes of interest was calculated.

[0472] Primers and probes for measuring mouse β-actin or mouse GAPDH were designed from Primer Express (Applied Biosystems) based on the genetic information of each gene. The nucleotide sequences are as shown below. The mouse β-actin-corrected expression levels (copy/5 ng RNA) for each of the genes are shown in FIG. 4.
[0473] mouse β-actin forward primer (SEQ ID NO: 18)
[0474] ACTATTGGCAACGAGCGGTTC
[0475] mouse β-actin reverse primer (SEQ ID NO: 19)
[0476] GGATGCCACAGGATTCCATACC
[0477] mouse β-actin TaqMan probe (SEQ ID NO: 20)
[0478] (FAM) CCTGAGGCTCTTTTCCAGCCTTCCTTCT (TAMRA) -3′
[0479] mouse GAPDH forward primer (SEQ ID NO: 21)
[0480] GCACCACCAACTGCTTAGCC
[0481] mouse GAPDH reverse primer (SEQ ID NO: 22)
[0482] CTTTGGCATTGTGGAAGGGCTCATG
[0483] mouse GAPDH TaqMan probe (SEQ ID NO: 23·
[0484] (FAM) GATGCAGGGATGATGTTCTGG (TAMRA)-3′
[0485] FAM: 6-carboxy-fluorescein
[0486] TAMRA: 6-carboxy-N,N,N′,N′-tetramethylrhodamine

[0487] According to the result of quantitative PCR, the expression level in the lung of OVA antigen-exposed bronchial hypersensitivity mice was about 50 times higher than that in the lung of physiological saline-inhaled mice. This finding suggests that the pendrin gene may be an important gene that controls the progression of allergic reactions, particularly asthma because the gene is expressed at a higher level in the lung of OVA antigen-exposed bronchial hypersensitivity model mouse that mimics human asthma.

### EXAMPLE 9

### Determination of the Localization of pendrin mRNA in the Lung of OVA antigen-exposed bronchial Hypersensitivity Model by in situ Hybridization (Hereinafter Referred to as “ISH”)

[0488] After perfusion fixation with 10% buffered neutral formalin, the pulmonary tissues were collected from three mice each of the four groups (the untreated group; the physiological saline-inhaled group; the Prednisolone-administered group; and the OVA antigen-inhaled group) used in Example 9. The tissues were fixed with 10% buffered neutral formalin, and then embedded in paraffin to prepare tissue blocks.

[0489] All paraffin blocks from the mouse lung samples were sliced into 7 μm sections. Then, the sections were treated with hematoxylin for nuclear staining. Among the sections, sections exhibiting good tissue morphology were selected from a single individual each of the physiological saline-inhaled group and OVA antigen-inhaled group. The sections were tested by ISH. The nucleotide sequence of the ISH probe is shown in SEQ ID NO: 24.

[0490] The paraffin sections of mouse lung tissues from the physiological-saline-inhalation group and the OVA-antigen-inhalation group were rehydrated by deparaffinization (washed with water after treatment with xylene, 100%, 90%, 80%, and 70% alcohol) . Then, the sections were treated with the above probe. After the staining, the sections were treated for nuclear staining. The condition used for the ISH experiments is described below. The result of ISH is shown in FIG. 5.
[0491] Probe concentration: 250 ng/ml
[0492] hybridization temperature: 60° C.
[0493] Duration of hybridization: 6 hours
[0494] Post-hybridization wash: 0.1×SSC/70° C./6 minutes/3 times
[0495] Coloring reagents: NBT/BCIP
[0496] Duration of color development: 7 hours

[0497] The ISH result showed that the mouse lung sections from the OVA antigen inhalation group gave a specific staining pattern with the antisense probe. Blue deposits were detectable in the bronchia, bronchiole and macrophages in the pulmonary alveoli. Blue deposits with similar intensity were also found on the epithelial cells of bronchial mucosa. The sense probe resulted in no deposits.

### EXAMPLE 10

### PAS Staining and Alcian Blue Staining of Lung Tissues of OVA antigen-exposed bronchial Hypersensitivity Model

[0498] The localization of the huge glycoprotein mucin in the lung tissue of OVA antigen-exposed bronchial hypersensitivity model was confirmed by PAS staining for acidic sugar chains and Alcian Blue staining for basic sugar chains. The paraffin blocks of mouse lung tissues from the physiological-saline-inhalation group and the OVA-antigen-inhalation group used in Example 10 were sliced into 3-μm sections. After being rehydrated by deparaffinization (washed with water after treatment with xylene, 100%, 90%, 80% and 70% alcohol), the sections were treated by PAS staining and Alcian Blue staining. The result obtained by the staining is shown in FIG. 6. The reaction conditions used are as follows:

[0499] PAS staining:
[0500] 1% periodate solution for 10 minutes
[0501] washing with water for 5 minutes
[0502] cold Schiff's reagent for 15 minutes
[0503] sulfuric water for 2 minutes 3 times
[0504] washing with water

[0505] Alcian Blue staining:
[0506] 3% acetic acid for 1 minute
[0507] Alcian Blue staining solution (pH 2.5) for 30 minutes
[0508] 3% acetic acid; washing five times
[0509] washing with water
[0510] dehydration, clearing and mounting
[0511] 70% alcohol for 5 minutes
[0512] 80% alcohol for 5 minutes
[0513] 90% alcohol for 5 minutes
[0514] 100% alcohol for 5 minutes twice
[0515] xylene for 5 minutes twice
[0516] xylene type mounting agent; mounting with cover glasses

[0517] Both PAS staining and Alcian Blue staining resulted in positive reactions in the cytoplasmic granules in epithelial cells and goblet cells of bronchial mucosal membrane. This indicates that the epithelial cells and goblet cells of bronchial mucosal membrane contain mucin. According to the results obtained in Examples 12 and 13, the pendrin mRNA are localized in the epithelial cells and goblet cells of bronchial mucosal membrane.

### EXAMPLE 11

### Variations in the Expression Levels of Marker Genes in bronchial Hypersensitivity Model Mouse

1. RNA recovery from the lung of OVA antigen-exposed bronchial hypersensitivity model mouse

[0518] As mentioned above, the OVA antigen-exposed bronchial hypersensitivity model using 7-week old male Balb/c mice has been reported to mimic human asthma. This mouse model is prepared as described in Example 7. In such mice, bronchial hypersensitivity is enhanced after the final antigen inhalation. Thus, symptoms quite similar to those of asthma can be induced in this model.

[0519] In this Example, RNAs were isolated from the lung and trachea 24 hours after the first, second or third exposure to OVA antigen, and cDNA and cRNA were synthesized from the RNAs. The respective samples were analyzed using a mouse GeneChip (MG-U74A-C), and the result obtained was compared to that from the human goblet cell differentiation model.

[0520] RNAs were isolated from the lung and trachea 24 hours after the first, second and third exposure to OVA antigen. The test was conducted using the following four groups: OVA antigen-inhaled bronchial hypersensitivity group (S-OVA); the three control groups: untreated group (naive); physiological saline-inhaled group in which OVA antigen was given twice for immunization and physiological saline was given by inhalation (S-Sal); and Prednisolone-treated group, in which Prednisolone was given by inhalation 10 times in total from the day before antigen inhalation until the final antigen inhalation, and the development of bronchial hypersensitivity was suppressed by giving 5 mg/kg Prednisolone orally (Pred).

[0521] The lung and trachea were resected 24 hours after the first, second and third exposure to OVA antigen. Each tissue was crushed with a homogenizer called Polytrone immediately after dissolving in Isogen (Nippon Gene; Wako Pure Chemical Industries). RNA was isolated from 1 ml of this solution according to the protocol attached to Isogen. Chloroform was added to the solution. After the mixture was stirred and centrifuged, the aqueous layer was recovered. Then, isopropanol was added to the aqueous solution obtained. After the mixture was stirred and centrifuged, the precipitated total RNA was collected. Total RNAs (approximately 20-60 μg) were extracted from the samples of the twelve groups described above.

2. Synthesis of cRNA for GeneChip

[0522] Biotinylated cRNA was synthesized by the same method as described in Example 4. About 20-50 μg biotinylated cRNAs were synthesized from the cDNAs obtained from the twelve groups described above. The cRNAs were purified using RNeasy Spin column (QIAGEN), and then converted into fragments by heat treatment. A 15-μg aliquot of each cRNA was added to a Hybridization Cocktail according to the Expression Analysis Technical Manual. The cocktail is added to an array chip, followed by incubation for hybridization at 45° C. for 16 hours. After hybridization, the chip was stained and analyzed by the same procedure as described in Example 4.

3. GeneChip Analysis

[0523] Data analysis was performed using Suite 4.0, which is a GeneChip analysis software. Average Intensity (1) and Background Average (2) were determined by Absolute Analysis, and four average values obtained (naive group, S-Sal group, S-OVA group, and Pred group) by subtracting (2) from (1). These four values were used as scale factors for comparison analysis.

[0524] First, absolute analysis was performed to analyze one chip data. Positives and negatives were determined by comparing the fluorescence intensity of perfect match and mismatch of a probe set. Determination of the three categories of Absolute Calls, i.e., P (present), A (absent), and M (marginal), were made by values of Pos Fraction, Log Avg, and Pos/Neg:

[0525] Pos Fraction; ratio of positive pairs.

[0526] Log Avg; average of the log of fluorescence intensity ratio between probe cells of perfect match and mismatch.

[0527] Pos/Neg; ratio of the number of positive pairs and negative pairs.

[0528] Additionally, Average Difference (Avg Diff), which is the average value of the difference in fluorescence intensities between perfect matching and mismatching probe cells, was calculated for each gene.

[0529] Next, Comparison Analysis was performed on two sets of data. For example, comparison was made between S-Sal group and S-OVA group, and the difference in expression levels was ranked as follows.

[0530] Determination of the 5 categories of difference calls, which are I, D, MI, MD, and NC, were made from values of Inc/Dec, Inc Ratio, Dpos-Dneg Ratio, and Log Avg Ratio Change.
[0531] Inc: Number of probe pairs that corresponded to S-Sal group and S-OVA group and that were judged to have increased expression levels in S-OVA group.
[0532] Dec: Number of pairs judged to have decreased expression levels in S-OVA group.
[0533] Inc/Dec: Ratio of the number of pairs judged to be Inc and number of pairs judged to be Dec.
[0534] Inc Ratio: Number of pairs judged to be Inc/number of pairs actually used.
[0535] Dpos/Dneg Ratio: Ratio between the number of Neg Change subtracted from that of Pos Change, and the number of pairs actually used.
[0536] Pos Change: Difference between the number of positive pairs in Absolute Analysis of S-Sal group, and the number of positive pairs in Absolute Analysis of S-OVA group.
[0537] Neg Change: Difference between the number of negative pairs in Absolute Analysis of S-Sal group, and the number of negative pairs in Absolute Analysis of S-OVA group.
[0538] Log Avg Ratio Change: Difference between Log Avg in Absolute Analysis of S-Sal group and S-OVA group.
[0539] Increased: I,
[0540] Decreased: D,
[0541] Marginally Increased: MI,
[0542] Marginally Decreased: MD, and
[0543] No Change: NC
   4. Comparison of a group of genes associated with goblet cell differentiation, which was narrowed down using the chips of HG-U95A to HG-U95E, with a group of genes derived from the OVA antigen-exposed bronchial hypersensitivity model, which was narrowed down using the chips of MG-U74A, MG-U74B, and MG-U74C

[0544] NetAffx database (Affymetrix) was searched for the mouse counterparts of the genes narrowed down using HG-U95A to HG-U95E chips as described above. The Fold Change values are shown in Tables 40 to 83, which were obtained by further analyzing the counterpart genes contained in mouse GeneChip MG-U74A to MG-U74C comparatively between S-Sal group and S-OVA group using Suite4.0 (Affymetrix).

[0545] Based on the expression levels in the mouse asthma model, the genes categorized are shown in Tables 40 to 62 (mouse counterpart genes of the human genes whose expression levels were found to increase by IL-13 under the culture conditions according to the AI method) and Tables 63 to 83 (mouse counterpart genes of the human genes whose expression levels were found to be decreased by IL-13 under the culture condition according to the AI method).

TABLE 40

| | | | | mouse | | | | | |
|---|---|---|---|---|---|---|---|---|---|
| cat | | human | | | mouse | | mouse_Ref | mouse_Ref | mouse_Map |
| # | category | Probe ID | title | # | Probe ID | GenBank | Seq | SeqP | Location |
| 2 | cell adhesion | 115_at | thrombospondin 1 | 1 | 160469_at | M62470 | NM_011580 | NP_035710 | 2 65.0 cM |
| 2 | cell adhesion | 1451_s_at | osteoblast | 2 | 92593_at | D13664 | NM_015784 | NP_056599 | — |
| | | | specific factor 2 | | | | | | |
| | | | (fasciclin | | | | | | |
| | | | I-like) | | | | | | |
| 2 | cell adhesion | 1620_at | cadherin 6, | 3 | 101730_at | D82029 | NM_007666 | NP_031692 | 15 |
| | | | type 2 | | | | | | |
| 2 | cell adhesion | 32640_at | intercellular | 4 | 1011414_at | M33036 | — | — | 9 |
| | | | adhesion | | | | | | |
| | | | molecule 1 | | | | | | |
| | | | precursor | | | | | | |
| 2 | cell adhesion | 32640_at | intercellular | 5 | 96752_at | M90551 | — | — | 9 |
| | | | adhesion | | | | | | |
| | | | molecule 1 | | | | | | |
| | | | precursor | | | | | | |
| 2 | cell adhesion | 39119_s_at | natural killer | | none | | | | |
| | | | cell transcript 4 | | | | | | |
| 2 | cell adhesion | 35803_at | ras homolog gene | 6 | 105606_at | AW210072 | NM_028810 | NP_083066 | 2 C1.1 |
| | | | family, member E | | | | | | |
| 2 | cell adhesion | 35803_at | ras homolog gene | 7 | 163053_at | AA716925 | NM_028810 | NP_083086 | 2 C1.1 |
| | | | family, member E | | | | | | |
| 3 | cell cycles | 1794_at | cyclin D3 | 8 | 160545_at | M86183 | NM_007632 | NP_031658 | 17 |
| 3 | cell cycles | 1795_g_at | cyclin D3 | 8 | 160545_at | M86183 | NM_007632 | NP_03I658 | 17 |
| 4 | chemokine | 35061_at | small inducible | 9 | 140659_at | AA174767 | NM_019494 | NP_062367 | 5 |
| | | | cytokine | | | | | | |
| | | | subfamily B | | | | | | |
| | | | (Cys-X-Cys), | | | | | | |
| | | | member 11 | | | | | | |
| | | | precursor | | | | | | |
| 4 | chemokine | 431_at | small inducible | 10 | 93858_at | M33266 | NM_021274 | NP_067249 | 5 |
| | | | cytokine | | | | | | |
| | | | subfamily B | | | | | | |
| | | | (Cys-X-Cys), | | | | | | |
| | | | member 10 | | | | | | |
| 5 | cytokine | 1016_s_at | interleukin 13 | 11 | 95344_at | U65747 | NM_008356 | NP_032382 | X 63.0 cM |
| | related | | receptor, | | | | | | |
| | | | alpha 2 | | | | | | |
| 5 | cytokine | 1262_s_at | transforming | 12 | 93300_at | X57413 | NM_009367 | NP_033393 | 1 101.5 cM |
| | related | | growth factor, | | | | | | |
| | | | beta 2 | | | | | | |
| 6 | cytosolic | 276_at | DnaJ (Hsp40) | 13 | 97261_at | AF055664 | NM_008298 | NP_032324 | 5 21.0 cM |
| | protein | | homolog, sub- | | | | | | |
| | | | family A, | | | | | | |
| | | | member 1 | | | | | | |
| 6 | cytosolic | 39154_at | growth arrest | 14 | 101979_at | AF055638 | NM_011817 | NP_035947 | 13 |
| | protein | | and DNA-damage- | | | | | | |
| | | | inducible, gamma | | | | | | |

| | mouse | | | MASM5 | | | | | | |
|---|---|---|---|---|---|---|---|---|---|---|
| cat | chip | homo- | | | 1st | | 2nd | | 3rd | |
| # | ID | logy | name | 1st | P/A | 2nd | P/A | 3rd | P/A | reference |
| 2 | A | 94.00% | thrombospondin 1 | 1.1 | P | 1.7 | P | 1.5 | P | J. Biol. Chem. 265: |
| | | | | | | | | | | 16691-16698 (1990) |
| 2 | A | | osteoblast specific factor | 1.2 | P | 0.909 | P | 1 | P | Biochem. J. 294: 271-278 |
| | | | 2 (fasciclin I-like) | | | | | | | (1993) |
| | | | Curated Ortholog | | | | | | | |
| 2 | A | 89.83% | cadherin 6 Putative | 0.833 | A | 1.1 | A | 0.714 | P | Dev. Biol. 183: 183-194 (1997) |
| | | | Ortholog, (highly | | | | | | | |
| | | | conserved) | | | | | | | |
| 2 | A | | intercellular adhesion | 1 | A | 0.357 | A | 1 | A | Cell 52: 925-933 |
| | | | molecule | | | | | | | (1988) |
| | | | Curated Ortholog | | | | | | | |
| 2 | A | | intercellular adhesion | 1.3 | P | 1.2 | P | 0.714 | P | Cell 52: 925-933 |
| | | | molecule | | | | | | | (1988) |
| | | | Curated Ortholog | | | | | | | |
| 2 | | | | — | | — | | — | | |
| 2 | B | 93.06% | RIKEN cDNA 2610017M01 | 1.5 | P | 0.5 | P | 0.667 | A | Meth. Enzymol. 303: |
| | | | gene Putative Ortholog | | | | | | | 19-44 (1999) |
| | | | (highly conserved) | | | | | | | |
| 2 | B | 93.06% | RIKEN cDNA 2610017M01 | 1 | P | 0.833 | A | 1.2 | P | Meth. Enzymol. 303: |
| | | | gene Putative Ortholog | | | | | | | 19-44 (1999) |
| | | | (highly conserved) | | | | | | | |
| 3 | A | 90.68% | cyclin D3 Homolog | 0.625 | A | 1.1 | P | 0.833 | P | Cell 65: 701-713 |
| | | | | | | | | | | (1991) |
| 3 | A | 90.68% | cyclin D3 Homolog | 0.625 | A | 1.1 | P | 0.833 | P | Cell 65: 701-713 |
| | | | | | | | | | | (1991) |
| 4 | C | 83.78% | small inducible | 3.8 | P | 2 | P | 1 | A | J. Immunol. 164: |
| | | | cytokine subfamily B | | | | | | | 6322-6331 (2000) |
| | | | (Cys-X-Cys), | | | | | | | |
| | | | member 11 Putative | | | | | | | |
| | | | Ortholog | | | | | | | |
| 4 | A | 84.81% | small inducible | 1.3 | P | 1.7 | P | 2 | A | Biochem. Biophys. Res. |
| | | | cytokine B subfamily | | | | | | | Commun. |
| | | | (Cys-X-Cys), | | | | | | | 168: 1261-1267 (1990) |
| | | | member 10 Putative | | | | | | | |
| | | | Ortholog | | | | | | | |
| 5 | A | 80.61% | interleukin 13 receptor, | 1.4 | A | 1.5 | A | 1.2 | A | J. Immunol. 161: |
| | | | alpha 2 | | | | | | | 2317-2324 (1998) |
| | | | Putative Ortholog | | | | | | | |
| 5 | A | 94.07% | transforming growth | 0.769 | P | 0.833 | P | 0.5 | P | Mol. Endocrinol. 3: |
| | | | factor, beta 2 Putative | | | | | | | 1108-1114 (1989) |
| | | | Ortholog | | | | | | | |
| | | | (highly conserved) | | | | | | | |
| 6 | A | 91.15% | DnaJ (Hsp40) homolog, | 0.476 | P | 0.909 | P | 0.833 | P | Genomes 53 (3), 415 |
| | | | subfamily A, | | | | | | | (1998) |
| | | | member 1 Homolog | | | | | | | |
| 6 | A | 88.68% | growth arrest and DNA- | 2.3 | P | 5.4 | P | 1.9 | P | Oncogene: - (1999) |
| | | | damage-inducible 45 gamma | | | | | | | |
| | | | Putative Ortholog | | | | | | | |

[0546] TABLE 41

| | | | | | | | | | |
|---|---|---|---|---|---|---|---|---|---|
| 6 | cytosolic | 39154_at | growth | 15 | 109336_at | AI035425 | NM_011817 | NP_035947 | 13 |
| | protein | | arrest and | | | | | | |
| | | | DNA-damage- | | | | | | |
| | | | inducible, | | | | | | |
| | | | gamma | | | | | | |

| | | | | | | | | | | |
|---|---|---|---|---|---|---|---|---|---|---|
| 6 | B | 88.68% | growth arrest and DNA-damage- | 0.909 | A | 1.7 | P | 0.909 | A | Oncogene: - (1999) |
| | | | inducible 45 gamma Putative | | | | | | | |
| | | | Ortholog | | | | | | | |

| | | | | mouse | | | | | |
|---|---|---|---|---|---|---|---|---|---|
| cat | | human | | | mouse | | mouse_Ref | mouse_Ref | mouse_Map |
| # | category | Probe ID | title | # | Probe ID | GenBank | Seq | SeqP | Location |
| 7 | enzyme | 1948_f_at | nitric oxide synthase | 16 | 104420_at | U43428 | NM_010927 | NP_035057 | 11 |
| | | | 2A (inducible. | | | | | | |
| | | | hepatocytes) | | | | | | |
| 7 | enzyme | 32571_at | methionine adenosyl- | 17 | 107939_at | AI021374 | — | — | — |
| | | | transferase II, alpha | | | | | | |
| 7 | enzyme | 32775_r_at | phospholipid | | none | | | | |
| | | | scramblase 1 | | | | | | |
| 7 | enzyme | 34795_at | procollagen-lysine, | 18 | 114376_at | AW259579 | NM_011961 | NP_036091 | 9 52.0 cM |
| | | | 2-oxoglutarate | | | | | | |
| | | | 5-dioxygenase | | | | | | |
| | | | (lysine hydroxylase) 2 | | | | | | |
| 7 | enzyme | 34823_at | dipeptidylpeptidase | 19 | 92634_at | U12620 | NM_010074 | NP_034204 | 2 35.0 cM |
| | | | IV (CD26, | | | | | | |
| | | | adenosine deaminase | | | | | | |
| | | | complexing protein 2) | | | | | | |
| 7 | enzyme | 36495_at | fructose-1,6- | 20 | 96918_at | AI790931 | NM_019395 | NP_062268 | 13 |
| | | | biphosphatase (FBP1) | | | | | | |
| | | | gene, exon 7 | | | | | | |
| 7 | enzyme | 37483_at | histone deacetylase 9 | 21 | 165678_i_at | AI482191 | — | — | — |
| 7 | enzyme | 38121_at | tryptophanyl-tRNA | | — | X69657 | NM_011710 | NP_035840 | 12 |
| | | | synthetase | | | | | | |
| 7 | enzyme | 38178_at | 17-beta-hydroxysteroid | 22 | 169670_at | AV028295 | NM_008290 | NP_032316 | 8 |
| | | | dehydrogenase | | | | | | |
| | | | (17b-HSD) gene | | | | | | |
| 7 | enzyme | 38178_at | 17-beta-hydroxyeteroid | 23 | 166141_i_at | AV224027 | NM_008290 | NP_032316 | 8 |
| | | | dehydrogenase | | | | | | |
| | | | (17b-HSD) gene | | | | | | |
| 7 | enzyme | 38178_at | 17-beta-hydroxysteroid | 24 | 101891_at | Y09517 | NM_008290 | NP_032316 | 8 |
| | | | dehydrogenase | | | | | | |
| | | | (17b-HSD) gene | | | | | | |
| 7 | enzyme | 38220_at | dihydropyrimidine | 25 | 111949_at | AI853171 | — | — | — |
| | | | dehydrogenase | | | | | | |
| 7 | enzyme | 38287_at | proteasome (prosome, | 26 | 93085_at | D444S6 | NM_013585 | NP_0386I3 | 17 18.59 |
| | | | macropain) subunit, beta | | | | | | cM |
| | | | type, 9 (large multi- | | | | | | |
| | | | functional protein) | | | | | | |
| 7 | enzyme | 38388_at | 2′-5′ oligoadenylate | 27 | 102717_at | X58077 | — | — | — |
| | | | synthetase gene, isoform | | | | | | |
| | | | E16, E18 | | | | | | |
| 7 | enzyme | 38389_at | 2′-5′ oligoadenylate | 27 | 102717_at | X58077 | — | — | — |
| | | | synthetase gene, isoform | | | | | | |
| | | | E16, E18 | | | | | | |
| 7 | enzyme | 38404_at | transglutaminase 2 (C | 28 | 93352_at | M55154 | NM_009373 | NP_033399 | 2 89.0 cM |
| | | | polypeptide, protein- | | | | | | |
| | | | glutamine- | | | | | | |
| | | | gamma-glutamyltransferase) | | | | | | |
| 7 | enzyme | 39263_at | 2′-5′ oligoadenylate | | none | | | | |
| | | | synthetase 2, isoform p69 | | | | | | |
| 7 | enzyme | 39425_at | thioredoxin reductase 1 | 29 | 161043_r_at | AV277568 | NM_015762 | NP_056577 | 10 |
| 7 | enzyme | 39425_at | thioredoxin reductase 1 | 30 | 99985_at | AB027565 | NM_015762 | NP_056577 | 10 |

| | mouse | | | MASM5 | | | | | | |
|---|---|---|---|---|---|---|---|---|---|---|
| cat | chip | homo- | | | 1st | | 2nd | | 3rd | |
| # | ID | logy | name | 1st | P/A | 2nd | P/A | 3rd | P/A | reference |
| 7 | A | | nitric oxide synthase 2, inducible, | 2.3 | A | 1.1 | A | 0.714 | A | J. Biol. Chem. 267: 6370-6374 (1992) |
| | | | macrophage Curated Ortholog | | | | | | | |
| 7 | B | 98.70% | Mus Musculus, Similar to guanylate | 1.9 | A | 1.2 | A | 0.833 | A | — |
| | | | nucleotide binding protein 3, clone | | | | | | | |
| | | | MGC: 6385 IMAGE: 3501441 mRNA. | | | | | | | |
| | | | complete cds Putative Ortholog | | | | | | | |
| 7 | | | | | | | | | | |
| 7 | B | 89.21% | procollagen lysine, 2-oxoglutarate 5- | 0.833 | P | 1.1 | P | 0.909 | P | Matrix Biol. 18: 325-329 (1999) |
| | | | dioxygenase 2 Putative Ortholog | | | | | | | |
| | | | highly conserved) | | | | | | | |
| 7 | A | 91.15% | dipeptidylpeptidase 4 Putative | 0.714 | A | 0.714 | A | 0.714 | P | J. Biol. Chem. 267: 2200-2208 (1992) |
| | | | Ortholog (highly conserved) | | | | | | | |
| 7 | A | 86.24% | fructose bisphosphatase 1 Putative | 0.769 | A | 2.3 | A | 1.7 | P | — |
| | | | Ortholog (highly conserved) | | | | | | | |
| 7 | C | 93.77% | expressed sequence AV022454 | 1.3 | P | 1.3 | P | 2.2 | P | — |
| | | | Putative Ortholog | | | | | | | |
| 7 | | 89.00% | tryptophanyl-tRNA synthetase | | | | | | | Biochimie 75 (12). 1027-1039 (1993) |
| 7 | C | 91.51% | hydroxysteroid (17-beta) | 0.769 | A | 0.909 | A | 0.385 | A | Biochem. J. 325: 199-205 (1997) |
| | | | dehydrogenase 2 Putative Ortholog | | | | | | | |
| 7 | C | 91.51% | hydroxysteroid (17-beta) | 0.714 | A | 0.526 | A | 1.9 | A | Biochem. J. 325: 199-205 (1997) |
| | | | dehydrogenase 2 Putative Ortholog | | | | | | | |
| 7 | A | 91.51% | hydroxysteroid (17-beta) | 1.8 | A | 0.667 | A | 0.909 | A | Biochem. J. 325: 199-205 (1997) |
| | | | dehydrogenase 2 Putative Ortholog | | | | | | | |
| 7 | B | 89.01% | Similar to dihydropyrimidine | 0.588 | A | 0.588 | A | 0.833 | A | — |
| | | | dehydrogenase, clone MGC: 37940 | | | | | | | |
| | | | IMAGE: 5126155, mRNA, complete cds | | | | | | | |
| | | | Putative Ortholog | | | | | | | |
| 7 | A | 85.87% | proteosome (prosome, macropain) | 2.1 | P | 1.6 | P | 1.1 | P | Immunogenetics 31: 79-88 (1990) |
| | | | subunit, beta type 9 (large | | | | | | | |
| | | | multifunctional protease 2) Putative | | | | | | | |
| | | | Ortholog (highly conserved) | | | | | | | |
| 7 | A | 84.39% | 2′-5′ oligoadenylate synthetase 1A | 1.6 | A | 1.7 | A | 2.2 | A | Nucleic Acids Res. 1991 Apr |
| | | | Homolog | | | | | | | 25: 19 (8): 1917-24. |
| 7 | A | 84.39% | 2′-5′ oligoadenylate synthetase 1A | 1.6 | A | 1.7 | A | 2.2 | A | Nucleic Acids Res. 1991 Apr |
| | | | Homolog | | | | | | | 25: 19 (8): 1917-24. |
| 7 | A | | transglutaminase 2, C polypeptide | 1 | P | 1.3 | P | 0.833 | P | J. Biol. Chem. 266: 478-483 (1991) |
| | | | Curated Ortholog | | | | | | | |
| 7 | | | | — | | — | | — | | — |
| 7 | A | | thioredoxin reductase 1 Curated | 1.4 | A | 1.8 | A | 0.588 | A | Gene. 2000 Jan 25: 242(1-2): 321-30. |
| | | | Ortholog | | | | | | | |
| 7 | A | | thioredoxin reductase 1 Curated | 1.2 | P | 0.909 | P | 1 | P | Gene. 2000 Jan 25: 242(1-2): 321-30. |
| | | | Ortholog | | | | | | | |

[0547] TABLE 42

| | | | | | | | | | |
|---|---|---|---|---|---|---|---|---|---|
| 7 | enzyme | 39425_at | thioredoxin reductase 1 | 31 | 161284_r_at | AV299386 | NM_015762 | NP_056577 | 10 |
| 7 | enzyme | 39425_at | thioredoxin reductase 1 | 32 | 162642_at | AI854834 | NM_015762 | NP_056577 | 10 |
| 7 | enzyme | 40505_at | ubiquitin- | | — | AF159230 | NM_019949 | NP_064333 | 2 |
| | | | conjugating enzyme E2L 6 | | | | | | |
| 7 | enzyme | 41352_at | sialyltransferase 1 | 33 | 94431_at | D16106 | NM_009175 | NP_033201 | 16 15.5 cM |
| | | | (beta-galactoside | | | | | | |
| | | | alpha-2,6- | | | | | | |
| | | | sialytransferase) | | | | | | |
| 7 | enzyme | 41352_at | sialyltransferase 1 | 34 | 167200_r_at | AV024481 | NM_009175 | NP_033201 | 16 15.5 cM |
| | | | (beta-galactoside | | | | | | |
| | | | alpha-2,6- | | | | | | |
| | | | sialytransferase) | | | | | | |
| 7 | enzyme | 41556_s_at | heparan sulfate | 35 | 102410_at | AF019385 | NM_010474 | NP_034604 | 5 22.0 cM |
| | | | D-glucosaminyl 3- | | | | | | |
| | | | O-sulfotransferase | | | | | | |
| | | | 1 precursor | | | | | | |

| | | | | | | | | | | |
|---|---|---|---|---|---|---|---|---|---|---|
| 7 | A | | thioredoxin reductase 1 Curated | 0.909 | P | 1.3 | P | 0.769 | P | Gene. 2000 Jan 25: |
| | | | Ortholog | | | | | | | 242(1-2): 321-30. |
| 7 | B | | thioredoxin reductase 1 Curated | 0.323 | A | 2.8 | A | 0.588 | A | Gene. 2000 Jan 25: |
| | | | Ortholog | | | | | | | 242(1-2): 321-30. |
| 7 | | | ubiquitin-conjugating enzyme | — | | — | | — | | Genome Res. 10(11). |
| | | | | | | | | | | 1757-1771 (2000) |
| 7 | A | | sialyltransferase 1 (beta-galactoside | 0.385 | A | 1.3 | A | 1.6 | A | Bioorg. Med. Chem. 1: |
| | | | alpha-2,6-sialyltransferase) Curated | | | | | | | 141-145 (1993) |
| | | | Ortholog | | | | | | | |
| 7 | C | | sialyltransferase 1 (beta-galactoside | 0.769 | A | 1.6 | A | 0.909 | A | Bioorg. Med. Chem. 1: |
| | | | alpha-2,6-sialyltransferase) Curated | | | | | | | 141-145 (1993) |
| | | | Ortholog | | | | | | | |
| 7 | A | 87.19% | heparan sulfate (glucosamine) 3-)- | 1.4 | A | 0.4 | A | 1 | P | J. Biol. Chem. 272: |
| | | | sulfotransferase 1 Putative Ortholog | | | | | | | 28008-28019 (1997) |
| | | | (highly conserved) | | | | | | | |

| | | | | mouse | | | | | |
|---|---|---|---|---|---|---|---|---|---|
| cat | | human | | | mouse | | mouse_Ref | mouse_Ref | mouse_Map |
| # | category | Probe ID | title | # | Probe ID | GenBank | Seq | SeqP | Location |
| 8 | hypothetical protein | 33787_at | KIAA0537 gene | 36 | 110469_at | AI844322 | — | — | 10 |
| | | | product | | | | | | |
| 8 | hypothetical protein | 34714_at | DKFZP564A032 | 37 | 109915_at | AA170781 | NM_018851 | NP_061339 | 2 |
| | | | protein | | | | | | |
| 8 | hypothetical protein | 34714_at | DKFZP564A032 | 38 | 103080_at | U15635 | NM_018851 | NP_061339 | 2 |
| | | | protein | | | | | | |
| 8 | hypothetical protein | 36070_at | cDNA DKFZp58600II8 | 39 | 166590_at | AV245197 | — | — | — |
| 8 | hypothetical protein | 36927_at | hypothetical | | — | AK020957 | — | — | — |
| | | | protein, expressed in | | | | | | |
| | | | osteoblast | | | | | | |
| 8 | hypothetical protein | 37230_at | KIAA0469 gene | | — | BF321302 | — | — | — |
| | | | product | | | | | | |
| 8 | hypothetical protein | 37784_at | DKFZp564N1116 | | — | none | — | — | — |
| 8 | hypothetical protein | 41402_at | DKFZP564O0823 | | — | none | — | — | — |
| | | | protein | | | | | | |
| 9 | interferon- inducible | 1107_s_at | interferon-stimulated | 40 | 98822_at | X56602 | NM_015783 | NP_056598 | — |
| | protein | | protein, 15 | | | | | | |
| | | | kDa | | | | | | |
| 9 | interferon-inducible | 38432_at | interferon-stimulated | 40 | 98822_at | X56602 | NM_015783 | NP_056598 | — |
| | protein | | protein, 15 | | | | | | |
| | | | kDa | | | | | | |
| 9 | interferon-inducible | 32814_at | interferon-induced | 41 | 100981_at | U43084 | NM_008331 | NP_032357 | 19 |
| | protein | | protein with | | | | | | |
| | | | tetratricopeptide | | | | | | |
| | | | repeats 1 | | | | | | |
| 9 | interferon-inducible | 32814_at | interferon-induced | 42 | 168299_f_at | AV090198 | NM_008331 | NP_032357 | 19 |
| | protein | | protein with | | | | | | |
| | | | tetratricopeptide | | | | | | |
| | | | repeats 1 | | | | | | |
| 9 | interferon-inducible | 915_at | interferon-induced | 41 | 100981_at | U43084 | NM_008331 | NP_032357 | 19 |
| | protein | | protein with | | | | | | |
| | | | tetratricopeptide | | | | | | |
| | | | repeats 1 | | | | | | |

| | mouse | | | MASM5 | | | | | | |
|---|---|---|---|---|---|---|---|---|---|---|
| cat | chip | homo- | | | 1st | | 2nd | | 3rd | |
| # | ID | logy | name | 1st | P/A | 2nd | P/A | 3rd | P/A | reference |
| 8 | B | 96.27% | ESTs Putative Ortholog (highly | 0.909 | A | 0.833 | A | 0.769 | A | — |
| | | | conserved) | | | | | | | |
| 8 | B | | SAM domain and HD domain, 1 | 1.2 | A | 0.303 | A | 1.1 | A | J. Leukoc. Biol. 57: |
| | | | Curated Ortholog | | | | | | | 477-483 (1995) |
| 8 | A | | SAM domain and HD domain, 1 | 1.3 | P | 1.3 | P | 0.909 | P | J. Leukoc. Biol. 57: |
| | | | Curated Ortholog | | | | | | | 477-483 (1995) |
| 8 | C | 87.91% | RIKEN cDNA 6330404C01 gene | 2 | A | 1 | A | 0.769 | A | — |
| | | | Putative Ortholog (highly conserved) | | | | | | | |
| 8 | | | RIKEN cDNA B230104P22 gene | — | | — | | — | | Meth. Enzymol. 303, |
| | | | | | | | | | | 19-44 (1999) |
| 8 | | 93.70% | IMAGE: 3673522 | — | | — | | — | | — |
| 8 | | | | — | | — | | — | | — |
| 8 | | | | — | | — | | — | | — |
| 9 | A | 84.17% | interferon-stimulated protein (15 | 4.3 | P | 4.2 | P | 2.2 | P | Unpublished: - ( ) |
| | | | kDa) Putative Ortholog (highly | | | | | | | |
| | | | conserved) | | | | | | | |
| 9 | A | | interferon-stimulated protein (15 kDa] | 4.3 | P | 4.2 | P | 2.2 | P | Unpublished: - ( ) |
| | | | Curated Ortholog | | | | | | | |
| 9 | A | 85.58% | interferon-induced protein with | 1.8 | P | 1.9 | P | 1.6 | P | Genomics 24: 137-148 |
| | | | tetratricopeptide repeats 1 | | | | | | | (1994) |
| | | | Putative Ortholog | | | | | | | |
| 9 | C | 85.58% | interferon-induced protein with | 1.3 | P | 1.1 | P | 1.2 | P | Genomics 24: 137-148 |
| | | | tetratricopeptide repeats 1 | | | | | | | (1994) |
| | | | Putative Ortholog | | | | | | | |
| 9 | A | 85.58% | interferon-induced protein with | 1.8 | P | 1.9 | P | 1.6 | P | Genomics 24: 137-148 |
| | | | tetratricopeptide repeats 1 | | | | | | | (1994) |
| | | | Putative Ortholog | | | | | | | |

[0548] TABLE 43

| | | | | | | | | | |
|---|---|---|---|---|---|---|---|---|---|
| 9 | interferon-inducible | 915_at | interferon-induced | 42 | 168299_f_at | AV090198 | NM_008331 | NP_032357 | 19 |
| | protein | | protein with | | | | | | |
| | | | tetratricopeptide | | | | | | |
| | | | repeats 1 | | | | | | |
| 9 | interferon-inducible | 33304_at | interferon stimulated | 43 | 103432_at | AW122677 | NM_020583 | NP_065608 | 7 |
| | protein | | gene (20 kD) | | | | | | |
| 9 | interferon-inducible | 38549_at | vipirin (cig5) | 44 | 109385_at | AI315194 | NM_021384 | NP_067359 | 12 |
| | protein | | mRNA | | | | | | |
| 9 | interferon-inducible | 38584_at | interferon-induced | | none | | | | |
| | protein | | protein with | | | | | | |
| | | | tetratricopeptide | | | | | | |
| | | | repeats 4 | | | | | | |
| 9 | interferon-inducible | 40322_at | interleukin 1 | 45 | 98501_at | Y07519 | NM_010743 | NP_034873 | 1 20.0 cM |
| | protein | | receptor-like 1 | | | | | | |
| 9 | interferon-inducible | 40322_at | interleukin 1 | 46 | 98500_at | D13695 | NM_010743 | NP_034873 | 1 20.0 cM |
| | protein | | receptor-like 1 | | | | | | |
| 9 | interferon-inducible | 425_at | interferon, alpha- | | none | | | | |
| | protein | | inducible protein | | | | | | |
| | | | 27 | | | | | | |
| 9 | interferon-inducible | 464_s_at | interferon-induced | | — | AW986054 | — | — | — |
| | protein | | protein 35 | | | | | | |
| 9 | interferon-inducible | 626_s_at | interferon-induced | | — | AW986054 | — | — | — |
| | protein | | protein 35 | | | | | | |
| 9 | interferon-inducible | 675_at | interferon induced | | — | AK003407 | — | BA8B22771 | 7F4 |
| | protein | | transmembrane | | | | | | |
| | | | protein 1 (9-27) | | | | | | |
| 9 | interferon-inducible | 1358_s_at | interferon, alpha- | | none | | | | |
| | protein | | inducible protein | | | | | | |
| | | | (clone IF1-6-16) | | | | | | |
| 9 | interferon-inducible | 37641_at | hepatitis C-associated | | none | | | | |
| | protein | | microtubular | | | | | | |
| | | | aggregate protein p44, | | | | | | |
| | | | exon 9 | | | | | | |
| 9 | interferon-inducible | 39728_at | interferon, gamma- | 47 | 97444_at | AI844520 | NM_023065 | NP_075552 | 8 |
| | protein | | inducible protein | | | | | | |
| | | | 30 | | | | | | |
| 9 | interferon-inducible | 39728_at | interferon, gamma- | 48 | 164423_at | AV076807 | NM_023065 | NP_075552 | 8 |
| | protein | | inducible protein | | | | | | |
| | | | 30 | | | | | | |
| 9 | interferon-inducible | 908_at | ISG-54K gene | 49 | 164273_at | AV276912 | — | — | — |
| | protein | | (interferon stimulated | | | | | | |
| | | | gene) encoding a | | | | | | |
| | | | 54 kDA protein | | | | | | |

| | | | | | | | | | | |
|---|---|---|---|---|---|---|---|---|---|---|
| 9 | C | 85.58% | interferon-induced protein with | 1.3 | P | 1.1 | P | 1.2 | P | Genomics 24: 137-148 |
| | | | tetratricopeptide repeats 1 | | | | | | | (1994) |
| | | | Putative Ortholog | | | | | | | |
| 9 | A | 85.18% | interferon-stimulated protein | 1 | P | 1.2 | P | 1 | P | Meth. Enzymol. 303: 19-44 |
| | | | (20 kDa) Putative Ortholog | | | | | | | (1999) |
| | | | (highly conserved) | | | | | | | |
| 9 | B | 85.85% | viral hemorrhagic septicemia | 0.769 | P | 1.7 | P | 0.286 | A | J. Virol. 73: 1846-1852 |
| | | | virus(VHSV) induced gene 1 | | | | | | | (1999) |
| | | | Putative Ortholog (highly | | | | | | | |
| | | | conserved) | | | | | | | |
| 9 | | | | — | | — | | — | | |
| 9 | A | 81.93% | interleukin 1 receptor-like | 0.769 | | 1.8 | | 1 | | Proc. Natl. Acad. Sci. U.S.A. |
| | | | 1 Curated Ortholog | | | | | | | 86: 5708-5712 (1989) |
| 9 | A | 81.75% | interleukin 1 receptor-like 1 | 1.3 | A | 3.4 | P | 2.4 | P | Proc. Natl. Acad. Sci. U.S.A. |
| | | | Putative Ortholog (highly | | | | | | | 86: 5708-5712 (1989) |
| | | | conserved) | | | | | | | |
| 9 | | | | — | | — | | — | | |
| 9 | — | 85.40% | expressed sequence AW986054 | — | | — | | — | | — |
| 9 | — | 85.40% | expressed sequence AW986054 | — | | — | | — | | — |
| 9 | — | | RIKEN cDNA 1110004C05 gene | — | | — | | — | | Meth. Enzymol. 303. 19-44 |
| | | | | | | | | | | (1999) |
| 9 | | | | — | | — | | — | | |
| 9 | | | | — | | — | | — | | |
| 9 | A | 78.22% | interferon gamma inducible | 1.3 | A | 1.9 | A | 1.8 | A | Science 294: 1361-1365 |
| | | | protein 30 Putative Ortholog | | | | | | | (2001) |
| 9 | B | 78.22% | interferon gamma inducible | 0.714 | A | 4 | P | 4.1 | A | Science 294: 1361-1365 |
| | | | protein 30 Putative Ortholog | | | | | | | (2001) |
| 9 | B | 86.38% | ESTs Putative Ortholog | 1 | A | 1 | A | 1.5 | A | — |

| | | | | mouse | | | | | |
|---|---|---|---|---|---|---|---|---|---|
| cat | | human | | | mouse | | mouse_Ref | mouse_Ref | mouse_Map |
| # | category | Probe ID | title | # | Probe ID | GenBank | Seq | SeqP | Location |
| 10 | kinase | 1560_g_at | p21 (CDKN1A)- | 50 | 97823_g_at | AW122689 | — | — | 16 |
| | | | activated kinase 2 | | | | | | |
| 10 | kinase | 1560_g_at | p21 (CDKN1A)- | 51 | 97822_at | AW122689 | — | — | 16 |
| | | | activated kinase 2 | | | | | | |
| 10 | kinase | 1560_g_at | p21 (CDKN1A)- | 52 | 97821_at | AI646056 | — | — | 16 |
| | | | activated kinase 2 | | | | | | |
| 10 | kinase | 35935_at | A kinase (PRKA) | 53 | 101435_at | AF033275 | NM_009649 | NP_033779 | 4 |
| | | | anchor protein 2 | | | | | | |

| | mouse | | | MASM5 | | | | | | |
|---|---|---|---|---|---|---|---|---|---|---|
| cat | chip | homo- | | | 1st | | 2nd | | 3rd | |
| # | ID | logy | name | 1st | P/A | 2nd | P/A | 3rd | P/A | reference |
| 10 | A | 95.19% | DNA segment. Chr 16. ERATO Doi | 1.1 | P | 1.1 | P | 1.1 | P | — |
| | | | 269, expressed Putative Ortholog | | | | | | | |
| 10 | A | 95.19% | DNA segment. Chr 16. ERATO Doi | 1 | P | 0.909 | P | 0.909 | P | — |
| | | | 269, expressed Putative Ortholog | | | | | | | |
| 10 | A | 95.19% | DNA segment. Chr 16. ERATO Doi | 0.909 | A | 1 | P | 1 | P | — |
| | | | 269, expressed Putative Ortholog | | | | | | | |
| 10 | A | 90.21% | A kinase anchor protein 2 Homolog | 0.833 | P | 0.833 | P | 1 | P | J. Biol. Chem. 273: |
| | | | | | | | | | | 6533-6541 (1998) |

[0549] TABLE 44

| | | | | | | | | | |
|---|---|---|---|---|---|---|---|---|---|
| 10 | kinase | 36632_at | A kinase (PRKA) anchor protein 10 | 54 | 163162_at | AI060985 | NM_019921 | NP_054305 | 11 |
| 10 | kinase | 36805_s_at | neurotrophic tyrosine kinase, receptor, | 55 | 110116_at | AW124632 | — | — | 3 |
| | | | type 1 | | | | | | |
| 10 | kinase | 38120_at | polycystin 2 | 56 | 100951_at | AF014010 | NM_008861 | NP_032887 | 5 55.0 cM |
| 10 | kinase | 38433_at | AXL receptor tyrosine kinase isoform 1, 2 | 57 | 99136_at | X63535 | NM_009465 | NP_033491 | 7 6.0 cM |

| | | | | | | | | | | |
|---|---|---|---|---|---|---|---|---|---|---|
| 10 | B | | A kinase (PRKA) anchor protein 10 Curated | 0.5 | A | 0.769 | A | 0.526 | A | Proc. Natl. Acad. Sci. U.S.A. 94 (21), |
| | | | Ortholog | | | | | | | 11184-11189 (1997) |
| 10 | B | 88.60% | neurotrophic tyrosine kinase, receptor type | 2.5 | A | 1.2 | A | 0.909 | A | — |
| | | | 1 Homolog | | | | | | | |
| 10 | A | 86.64% | polycystic kidney disease 2 Putative Ortholog | 0.769 | P | 0.667 | P | 0.667 | P | Genomics 45: 220-223 (1997) |
| | | | (highly conserved) | | | | | | | |
| 10 | A | 88.68% | AXL receptor tyrosine kinase Putative | 0.357 | A | 0.476 | A | 0.25 | A | Oncogene 6 (10), 1909-1913 (1991) |
| | | | Ortholog (highly conserved) | | | | | | | |

| | | | | mouse | | | | | |
|---|---|---|---|---|---|---|---|---|---|
| | | human | | | mouse | | mouse_Ref | mouse_Ref | mouse_Map |
| cat# | category | Probe ID | title | # | Probe ID | GenBank | Seq | SeqP | Location |
| 12 | membrane | 1609_g_at | proto-oncogene met, | | — | — | NM_008591 | NP_032617 | 6 4.0 cM |
| | protein | | hepatocyte growth | | | | | | |
| | | | factor receptor | | | | | | |
| 12 | membrane | 1812_s_at | proto-oncogene met, | | — | — | NM_008591 | NP_032617 | 6 4.0 cM |
| | protein | | hepatocyte growth | | | | | | |
| | | | factor receptor, alt. | | | | | | |
| | | | transcript 2 | | | | | | |
| 12 | membrane | 35684_at | met proto-oncogene | 58 | 100309_at | Y00671 | NM_008591 | NP_032617 | 6 4.0 cM |
| | protein | | precursor | | | | | | |
| 12 | membrane | 31610_at | epithelial protein up- | 59 | 96935_at | AW011791 | NM_026018 | NP_080294 | 4 |
| | protein | | regulated in carcinoma, | | | | | | |
| | | | membrane associate | | | | | | |
| 12 | membrane | 31610_at | epithelial protein up- | 60 | 162531_at | AW048375 | — | — | — |
| | protein | | regulated in carcinoma, | | | | | | |
| | | | membrane associate | | | | | | |
| 12 | membrane | 35276_at | claudin 4 | 61 | 101410_at | AB000713 | NM_009903 | NP_034033 | 5 75.0 cM |
| | protein | | | | | | | | |
| 12 | membrane | 36194_at | low density lipoprotein- | 62 | 100086_at | D00622 | — | BAA00500 | 5 |
| | protein | | related protein- | | | | | | |
| | | | associated protein | | | | | | |
| | | | 1(alpha-2-macroglobu | | | | | | |
| 12 | membrane | 36194_at | low density lipoprotein- | 63 | 161988_f_at | AV234541 | — | — | 5 |
| | protein | | related protein- | | | | | | |
| | | | associated protein | | | | | | |
| | | | 1(alpha-2-macroglobu | | | | | | |
| 12 | membrane | 37168_at | similar to lysosome- | | none | | | | |
| | protein | | associated membrane | | | | | | |
| | | | glycoprotein | | | | | | |
| 12 | membrane | 38995_at | transmembrane protein | 64 | 104516_at | U82758 | NM_013805 | NP_038833 | 16 11.65 cM |
| | protein | | claudin 5 | | | | | | |
| 12 | membrane | 39061_at | bone marrow stromal cell | | — | AY013776 | NM_053140 | NP_444370 | 18 |
| | protein | | antigen 2 | | | | | | |
| 12 | membrane | 39695_at | decay accelerating factor | 65 | 103617_at | D63679 | NM_010016 | NP_034146 | 1 67.6 cM |
| | protein | | for complement (CD55, | | | | | | |
| | | | Cromer blood group | | | | | | |
| | | | system) | | | | | | |
| 12 | membrane | 39695_at | decay accelerating factor | 66 | 164905_r_at | AV358386 | NM_010016 | NP_034146 | 1 67.6 cM |
| | protein | | for complement (CD55, | | | | | | |
| | | | Cromer blood group | | | | | | |
| | | | system) | | | | | | |
| 12 | membrane | 39695_at | decay accelerating factor | 67 | 107626_at | AA174516 | NM_010016 | NP_034146 | 1 67.6 cM |
| | protein | | for complement (CD55, | | | | | | |
| | | | Cromer blood group | | | | | | |
| | | | system) | | | | | | |
| 12 | membrane | 41045_at | secreted and trans- | 68 | 115133_at | AI875165 | NM_021401, | NP_067376, | 11 |
| | protein | | membrane 1 precusor | | | | NM_026907 | NP_081183 | |

| | mouse | | | MASM5 | | | | | | |
|---|---|---|---|---|---|---|---|---|---|---|
| | chip | homo- | | | 1 st | | 2nd | | 3 rd | |
| cat# | ID | logy | name | 1st | P/A | 2nd | P/A | 3rd | P/A | reference |
| 12 | — | | met proto-oncogene Putative | — | | — | | — | | — |
| | | | Ortholog | | | | | | | |
| 12 | — | | met proto-oncogene Putative | — | | — | | — | | — |
| | | | Ortholog | | | | | | | |
| 12 | A | 90.17% | met proto-oncogene Putative | 0.667 | A | 1 | A | 1.9 | A | Oncogene 2: 593- |
| | | | Ortholog | | | | | | | 599 (1988) |
| 12 | A | 83.76% | membrane-associated protein 17 | 1 | P | 0.909 | P | 1.1 | P | Meth. Enzymol. 303: |
| | | | Homolog | | | | | | | 19-44 (1999) |
| 12 | B | 86.36% | MP and activin membrane-bound | 1 | P | 0.769 | P | 0.769 | P | — |
| | | | inhibitor, homolog (Xanopus | | | | | | | |
| | | | laevis) | | | | | | | |
| 12 | A | | claudin 4 Curated Ortholog | 1.8 | A | 3.4 | A | 1 | P | J. Biol. Chem. 272 |
| | | | | | | | | | | (42), 26652-26658 |
| | | | | | | | | | | (1997) |
| 12 | A | | low density lipoprotein receptor- | 1.1 | P | 0.714 | P | 0.833 | P | J. Biochem. 108: 297- |
| | | | related protein associated | | | | | | | 302 (1990) |
| | | | protein 1 Curated Ortholog | | | | | | | |
| 12 | A | | low density lipoprotein receptor- | 1.3 | A | 0.714 | A | 1.1 | P | — |
| | | | related protein associated | | | | | | | |
| | | | protein 1 Curated Ortholog | | | | | | | |
| 12 | | | | — | | — | | — | | |
| 12 | A | 87.03% | claudin 5 Putative Ortholog | 1.1 | P | 1.2 | P | 0.769 | P | Lab. Invest. 78: 353- |
| | | | | | | | | | | 363(1998) |
| 12 | — | 87.60% | protocadherin beta 15 (Pcdhb 15) | — | | — | | — | | Cell 97 (6), 779-790 (1999) |
| 12 | A | | decay accelerating factor 1 | 1.2 | P | 1.5 | P | 1.3 | P | J. Immunol. 155: |
| | | | Curated Ortholog | | | | | | | 3079-3091(1995) |
| 12 | B | | decay accelerating factor 1 | 0.769 | A | 1 | A | 1.1 | A | J. Immunol. 155: |
| | | | Curated Ortholog | | | | | | | 3079-3091(1995) |
| 12 | B | | decay accelerating factor 1 | 1.3 | P | 1.6 | P | 1.9 | P | J. Immunol. 155: |
| | | | Curated Ortholog | | | | | | | 3079-3091(1995) |
| 12 | B | | secreted end transmembrane 1 | 0.435 | A | 0.5 | A | 0.625 | A | Meth. Enzymol. 303: |
| | | | Curated Ortholog | | | | | | | 19-44(1999) |

[0550] TABLE 45

| | | | | | | | | | |
|---|---|---|---|---|---|---|---|---|---|
| 13 | metabolism | 32363_at | cholesterol 25-hydroxylase | 69 | 104509_at | AF059213 | NM_009890 | NP_034020 | 19 |
| 13 | metabolism | 32363_at | cholesterol 25-hydroxylase | 70 | 133666_at | AI450812 | NM_009890 | NP_034020 | 19 |
| 13 | metabolism | 34636_at | arachidonate 15-lipoxygenase | 71 | 98758_at | L34570 | NM_009660 | NP_033790 | 11 40.0 cM |
| 13 | metabolism | 35017_f_at | phosphotidylinositol transfer | 72 | 102696_s_at | AI747899 | NM_019640 | NP_062614 | 5 |
| | | | protein, beta | | | | | | |
| 13 | metabolism | 353_at | phosphotidylinositol transfer | 72 | 102696_s_at | AI747899 | NM_019640 | NP_062614 | 5 |
| | | | protein, beta | | | | | | |
| 13 | metabolism | 353_at | phosphotidylinositol transfer | 73 | 102697_at | U46934 | NM_019640 | NP_062614 | 5 |
| | | | protein, beta | | | | | | |

| | | | | | | | | | | |
|---|---|---|---|---|---|---|---|---|---|---|
| 13 | A | | cholesterol 25-hydroxylase Putative Ortholog (highly | 1.1 | P | 3.1 | P | 1.9 | P | J. Biol. Chem. 273: |
| | | | conserved) | | | | | | | 34316-34327 (1998) |
| 13 | C | 86.15% | cholesterol 25-hydroxylase Putative Ortholog (highly | 0.588 | A | 0.909 | A | 0.769 | A | J. Biol. Chem. 273: |
| | | | conserved) | | | | | | | 34316-34327 (1998) |
| 13 | A | 82.14% | arachidonate 15-lipoxygenase Homolog | 1.1 | P | 3.5 | P | 8 | P | J. Biol. Chem. 269: |
| | | | | | | | | | | 13979-13987 (1994) |
| 13 | A | | phosphotidylinositol transfer protein, beta Curated Ortholog | 1.3 | P | 1 | P | 0.714 | P | — |
| 13 | A | | phosphotidylinositol transfer protein, beta Curated Ortholog | 1.3 | P | 1 | P | 0.714 | P | — |
| 13 | A | | phosphotidylinositol transfer protein, beta Curated Ortholog | 0.303 | A | 0.333 | A | 0.5 | A | — |

| | | | | mouse | | | | | |
|---|---|---|---|---|---|---|---|---|---|
| | | human | | | mouse | | mouse_Ref | mouse_Ref | mouse_Map |
| cat# | category | Probe 10 | title | # | Probe ID | GenBank | Seq | SeqP | Location |
| 14 | MHC | 34427_g_at | major histocompatibility | 74 | 101433_at | AF010452 | NM_008209 | NP_032235 | 1 H1 |
| | | | complex, class I-like | | | | | | |
| | | | sequence | | | | | | |
| 14 | MHC | 35937_at | MHC class I molecule | | none | | | | |
| | | | (MICB) gene | | | | | | |
| 14 | MHC | 37420_i_at | clone RP3-377H14 on | 75 | 98438_f_at | X16202 | NM_010394 | NP_034524 | 17 19.19 cM |
| | | | chromosome 6p21.32-22.1. | | | | | | |
| 14 | MHC | 37421_f_at | clone RP3-377H14 on | 75 | 98438_f_at | X16202 | NM_010394 | NP_034524 | 17 19.19 cM |
| | | | chromosome 6p21.32-22.1. | | | | | | |
| 15 | MMP related | 34839_at | metalloprotease 1 | | none | | | | |
| 15 | MMP related | 35479_at | a disintegrin and | 76 | 101723_r_at | UD6146 | — | AAA18425 | 14 |
| | | | metalloproteinase domain | | | | | | |
| | | | 28, isoform 1, 2, 3 | | | | | | |
| 15 | MMP related | 40712_at | a disintegrin and | 77 | 103024_at | X13335 | NM_007403 | NP_031429 | 7 |
| | | | metalloproteinase | | | | | | |
| | | | domain 8 precursor | | | | | | |
| 15 | MMP related | 668_s_at | matrix metalloproteinase | 78 | 92917_at | L36244 | NM_010810 | NP_034940 | 9 1.0 cM |
| | | | 7 matrilysin | | | | | | |
| 15 | MMP related | 668_s_at | | 79 | 114151_at | AI426250 | NM_010810 | NP_034940 | 9 1.0 cM |
| 15 | MMP related | 668_s_at | | 80 | 162318_r_at | AV069212 | NM_010810 | NP_034940 | 9 1.0 cM |
| 16 | oncogenesis | 40292_at | deleted in bladder | 81 | 166806_at | AI835337 | NM_019967 | NP_064351 | 13 |
| | | | cancer chromosome | | | | | | |
| | | | region candidate 1 | | | | | | |

| | mouse | | | MASM5 | | | | | | |
|---|---|---|---|---|---|---|---|---|---|---|
| | chip | homo- | | | 1 st | | 2nd | | 3 rd | |
| cat# | ID | logy | name | 1st | P/A | 2nd | P/A | 3rd | P/A | reference |
| 14 | A | 88.11% | histocompatibility-2 complex | 0.526 | A | 0.625 | A | 0.833 | A | Biochem. Biophys. Res. |
| | | | class I-like sequence Putative | | | | | | | Commun. 238: 697-702 |
| | | | Ortholog (highly conserved) | | | | | | | (1997) |
| 14 | | | | — | | — | | — | | |
| 14 | A | 92.79% | histocompatibility 2, Q region | 1.3 | P | 1.4 | P | 1.2 | P | EMBO J. 4: 3203-3207 |
| | | | locus 7 Putative Ortholog | | | | | | | (1985) |
| 14 | A | 92.79% | histocompatibility 2, Q region | 1.3 | P | 1.4 | P | 1.2 | P | EMBO J. 4: 3203-3207 |
| | | | locus 7 Putative Ortholog | | | | | | | (1985) |
| 15 | | | | — | | — | | — | | |
| 15 | A | 83.08% | a disintegrin and metalloprotease | 0.714 | A | 0.769 | A | 1.8 | A | Proc. Natl. Acad. Sci. |
| | | | domain 28 Putative Ortholog | | | | | | | U.S.A. 91: 2748-2751 |
| | | | | | | | | | | (1994) |
| 15 | A | 83.24% | a disintegrin and metalloprotease | 0.769 | A | 3.4 | A | 4.6 | P | Int. Immunol. 2: 585- |
| | | | domain 8 Putative Ortholog | | | | | | | 591(1990) |
| 15 | A | | matrix metalloproteinase 7 Curated | 2.3 | A | 1.6 | A | 1.6 | A | Mol. Biol. Cell 6: 851- |
| | | | Ortholog | | | | | | | 869 (1995) |
| 15 | B | 94.32% | ESTs, Highly similar to AF116721 8 | 1 | A | 1.2 | A | 1.4 | A | Mol. Biol. Cell 6: 851- |
| | | | PRO0907 [H. sapiens] Putative | | | | | | | 869 (1995) |
| | | | Ortholog (highly conserved) | | | | | | | |
| 15 | A | | matrix metalloproteinase 7 Curated | 0.769 | A | 1.7 | M | 1.3 | A | Mol. Biol. Cell 6: 851- |
| | | | Ortholog | | | | | | | 869 (1995) |
| 16 | C | 92.36% | deleted in bladder cancer | 1.4 | P | 1.5 | P | 1 | P | Unpublished: - ( ) |
| | | | chromosome region candidate 1 | | | | | | | |
| | | | (human) Putative Ortholog | | | | | | | |

[0551] TABLE 46

| | | | | | | | | | |
|---|---|---|---|---|---|---|---|---|---|
| 17 | others | 34484_at | ADP-ribosylation factor | 82 | 112883_at | AI835478 | — | — | 2 |
| | | | guanine nucleotide- | | | | | | |
| | | | exchange factor 2 | | | | | | |
| 17 | others | 38430_at | fatty acid binding | 83 | 100567_at | M20497 | NM_024406 | NP_077717 | 3 13.9 cM |
| | | | protein 4, adipocyte | | | | | | |
| 17 | others | 33612_at | tetraspan 3 | 84 | 97912_at | AI843488 | NM_019793 | NP_062767 | 9 |
| 17 | others | 39420_at | DNA-damage-inducible | 85 | 101429_at | X67083 | NM_007837 | NP_031863 | 10 |
| | | | transcript 3 | | | | | | |
| 17 | others | 39959_at | diubiquitin | 86 | 97647_at | M11408 | MM_013647 | NP_038675 | 7 |
| 17 | others | 39959_at | diubiquitin | 87 | 169860_r_at | M11408 | NM_013647 | NP_038675 | 7 |
| 17 | others | 39959_at | diubiquitin | 88 | 169362_f_at | AV069368 | NM_023137 | NP_075626 | 17 |
| 17 | others | 39959_at | diubiquitin | 89 | 92715_at | AV069368 | NM_023137 | NP_075626 | 17 |
| 17 | others | 39959_at | diubiquitin | 90 | 168938_r_at | AV069368 | NM_023137 | NP_075626 | 17 |
| 17 | others | 40456_at | up-regulated by | 91 | 112237_at | AI115916 | NM_026228 | NP_080504 | 3 |
| | | | BCG-CWS | | | | | | |
| 17 | others | 40456_at | up-regulated by | 92 | 97442_at | AI115916 | NM_026228 | NP_080504 | 3 |
| | | | BCG-CWS | | | | | | |
| 27 | transporter | 34759_at | hbc647 mRNA sequence | 93 | 110839_at | AI839647 | — | — | — |

| | | | | | | | | | | |
|---|---|---|---|---|---|---|---|---|---|---|
| 17 | B | 96.30% | expressed sequence AI463430 | 1 | P | 0.909 | P | 1.5 | P | — |
| | | | Putative Ortholog | | | | | | | |
| 17 | A | 86.37% | fatty acid binding protein 4, | 0.556 | P | 0.714 | P | 1.1 | P | Proc. Natl. Acad. Sci. |
| | | | adipocyte Putative Ortholog | | | | | | | U.S.A. 81: 5468- |
| | | | | | | | | | | 5472 (1984) |
| 17 | A | 91.42% | transmembrane 4 superfamily | 3.6 | A | 1 | A | 0.769 | A | Genome Res. 10: 1617-1630 |
| | | | member 8 Putative Ortholog | | | | | | | (2000) |
| | | | (highly conserved) | | | | | | | |
| 17 | A | | DNA-damage inducible transcript 3 | 0.37 | A | 0.526 | A | 0.625 | A | Genes Dev. 6: 439-453(1992) |
| | | | Curated Ortholog | | | | | | | |
| 17 | A | 90.60% | ribosomal protein S16 Putative | 1 | P | 1 | P | 1 | P | Mol. Cell. Biol. 5: 3560- |
| | | | Ortholog (highly conserved) | | | | | | | 3576 (1985) |
| 17 | C | 90.60% | ribosomal protein S16 Putative | 33 | P | 1.4 | A | 1.1 | A | Mol. Cell. Biol. 5: 3560- |
| | | | Ortholog (highly conserved) | | | | | | | 3576 (1985) |
| 17 | C | | ubiquitin D Curated Ortholog | 1.2 | A | 1 | A | 0.667 | A | Genome Res 10: 1617-1630 |
| | | | | | | | | | | (2000) |
| 17 | A | | ubiquitin D Curated Ortholog | 0.714 | A | 0.455 | A | 0.625 | A | Genome Res. 10: 1617-1630 |
| | | | | | | | | | | (2000) |
| 17 | C | | ubiquitin D Curated Ortholog | 1.4 | P | 0.667 | A | 1.4 | A | Genome Res.10: 1617-1630 |
| | | | | | | | | | | (2000) |
| 17 | B | 87.41% | RIKEN cDNA 4933419D20 gene | 1.1 | P | 1 | P | 1 | P | Meth. Enzymol. 303: 19-44 |
| | | | Putative Ortholog (highly | | | | | | | (1999) |
| | | | conserved) | | | | | | | |
| 17 | A | 87.41% | RIKEN cDNA 4933419D20 gene | 1.2 | P | 1 | P | 0.833 | P | Meth. Enzymol. 303: 19-44 |
| | | | Putative Ortholog (highly | | | | | | | (1999) |
| | | | conserved) | | | | | | | |
| 27 | B | 97.01% | expressed sequence AI839647 | 0.909 | P | 0.833 | P | 0.909 | P | — |
| | | | Putative Ortholog (highly | | | | | | | |
| | | | conserved) | | | | | | | |

| | | | | mouse | | | | | |
|---|---|---|---|---|---|---|---|---|---|
| | | human | | | mouse | | mouse_Ref | mouse_Ref | mouse_Map |
| cat# | category | Probe ID | title | # | Probe ID | GenBank | Seq | SeqP | Location |
| 19 | phosphatase | 38272_at | dual specificity | 94 | 162702_at | AI851272 | NM_019819 | NP_062793 | 11 48.0 cM |
| | | | phosphatase 14 | | | | | | |
| 19 | phosphatase | 38272_at | dual specificity | 95 | 165144_r_at | AV357704 | NM_019819 | NP_062793 | 11 48.0 cM |
| | | | phosphatase 14 | | | | | | |
| 19 | phosphatase | 38272_at | dual specificity | 96 | 171285_at | AV216631 | NM_019819 | NP_062793 | 11 48.0 cM |
| | | | phosphatase 14 | | | | | | |
| 19 | phosphatase | 677_s_at | acid phosphatase 5, | 97 | 162543_r_at | AV248962 | NM_007388 | NP_031414 | 9 6.0 cM |
| | | | tartrate resistant | | | | | | |
| 19 | phosphatase | 677_s_at | acid phosphatase 5, | 98 | 98859_at | M99054 | NM_007388 | NP_031414 | 9 6.0 cM |
| | | | tartrate resistant | | | | | | |
| 20 | protein | 41592_at | JAK binding protein | 99 | 92832_at | U88325 | NM_009896 | NP_034026 | 16 |
| | binding | | | | | | | | |
| | protein | | | | | | | | |
| 21 | proteinase | 133_at | cathepsin C | 100 | 101019_at | U74683 | NM_009982 | NP_034112 | 7 D3-E1.1 |
| 21 | proteinase | 133_at | cathepsin C | 101 | 161251_f_at | AV316954 | NM_009982 | NP_034112 | 7 D3-E1.1 |

| | mouse | | | MASM5 | | | | | | |
|---|---|---|---|---|---|---|---|---|---|---|
| | chip | homo- | | | 1 st | | 2nd | | 3 rd | |
| cat# | ID | logy | name | 1 st | P/A | 2nd | P/A | 3rd | P/A | reference |
| 19 | B | 90.68% | dual specificity phosphatase | 1.2 | P | 1.1 | P | 1 | P | Genome Res. 10: 1617- |
| | | | 14 Putative Ortholog (highly | | | | | | | 1630 (2000) |
| | | | conserved) | | | | | | | |
| 19 | B | 90.68% | dual specificity phosphatase | 0.5 | A | 0.833 | A | 1.1 | A | Genome Res. 10: 1617- |
| | | | 14 Putative Ortholog (highly | | | | | | | 1630 (2000) |
| | | | conserved) | | | | | | | |
| 19 | C | 90.68% | dual specificity phosphatase | 1.7 | A | 0.909 | A | 2.3 | A | Genome Res. 10: 1617- |
| | | | 14 Putative Ortholog (highly | | | | | | | 1630 (2000) |
| | | | conserved) | | | | | | | |
| 19 | B | | acid phosphatase 5, tartrate | 4.3 | A | 6.8 | A | 8.7 | A | Gene 130: 201-207 (1993) |
| | | | resistant Curated Ortholog | | | | | | | |
| 19 | A | 84.39% | acid phosphatase 5, tartrate | 0.769 | P | 1.4 | P | 1.7 | P | Gene 130: 201-207 (1993) |
| | | | resistant Homolog | | | | | | | |
| 20 | A | 90.16% | cytokine inducible SH2- | 1.6 | A | 1.9 | A | 1.5 | P | Mol. Reprod. Dev. 43: 1- |
| | | | containing protein 1 Putative | | | | | | | 6(1996) |
| | | | Ortholog (highly conserved) | | | | | | | |
| 21 | A | | cathepsin C Curated Ortholog | 1.2 | P | 1.1 | P | 1 | P | Biochim. Biophys. Acta |
| | | | | | | | | | | 1351 (3), 267-273 (1997) |
| 21 | A | | catnepsin C Curated Ortholog | 0.667 | A | 1 | A | 1.2 | A | Biochim. Biophys. Acta |
| | | | | | | | | | | 1351 (3), 267-273 (1997) |

[0552] TABLE 47

| | | | | | | | | | |
|---|---|---|---|---|---|---|---|---|---|
| 21 | proteinase | 133_at | cathepsin C | 102 | 101020_at | AI842667 | NM_009982 | NP_034112 | 7 D3-E1.1 |
| 21 | proteinase | 34702_f_at | endogenous retroviral | | none | | | | |
| | | | protease | | | | | | |
| 21 | proteinase | 40496_at | complement component 1, | | — | AA798057 | — | — | — |
| | | | s subcomponent | | | | | | |
| 21 | proteinase | 811_at | ubiquitin fusion | 103 | 93303_at | U64445 | NM_011672 | NP_035802 | 16 11.75 cM |
| | | | degradation 1-like | | | | | | |

| | | | | | | | | | | |
|---|---|---|---|---|---|---|---|---|---|---|
| 21 | A | | cathepsin C Curated Ortholog | 1.8 | A | 0.625 | A | 0.909 | A | Biochim. Biophys. Acta 1351 (3), |
| | | | | | | | | | | 267-273 (1997) |
| 21 | | | | — | | — | | — | | |
| 21 | — | 86.70% | complement component 1, s subcomponent | — | | — | | — | | — |
| 21 | A | | ubiquitin fusion degradation 1 like | 0.567 | M | 0.303 | A | 1.3 | P | Hum. Mol. Genet. 6: 259-265 (1997) |
| | | | Curated Ortholog | | | | | | | |

| | | | | mouse | | | | | |
|---|---|---|---|---|---|---|---|---|---|
| | | | | | | | mouse_{—} | mouse_{—} | |
| | | human | | | mouse | | Ref | Ref | mouse_Map |
| cat# | category | Probe ID | title | # | Probe ID | GenBank | Seq | SeqP | Location |
| 22 | proteinase | 1549_s_at | serine (or cysteine) | | — | AF063937 | NM_009126 | NP_033152 | 1 E1-E2 |
| | inhibitor | | proteinase inhibitor, | | | | | | |
| | | | clade B (ovalbumin), | | | | | | |
| | | | member 4 | | | | | | |
| 22 | proteinase | 32620_at | fetuin B | 104 | 108524_at | U64445 | NM_011672 | NP_035802 | 16 11.75 cM |
| | inhibitor | | | | | | | | |
| 22 | proteinase | 33101_g_at | fetuin B | 104 | 108524_at | U64445 | NM_011672 | NP_035802 | 16 11.75 cM |
| | inhibitor | | | | | | | | |
| 22 | proteinase | 34789_at | serine (or cysteine) | 105 | 96060_at | U25844 | NM_009254 | NP_033280 | 13 16.0 cM |
| | inhibitor | | proteinase inhibitor, | | | | | | |
| | | | clade B (ovalbumin), | | | | | | |
| | | | member 6 | | | | | | |
| 22 | proteinase | 34789_at | serine (or cysteine) | 106 | 113899_at | AW121899 | NM_007840 | NP_031866 | 11 63.0 cM |
| | inhibitor | | proteinase inhibitor, | | | | | | |
| | | | clade B (ovalbumin), | | | | | | |
| | | | member 6 | | | | | | |
| 22 | proteinase | 34789_at | serine (or cysteine) | 107 | 93493_at | X65627 | NM_007840 | NP_031866 | 11 63.0 cM |
| | inhibitor | | proteinase inhibitor, | | | | | | |
| | | | clade B (ovalbumin), | | | | | | |
| | | | member 6 | | | | | | |
| 22 | proteinase | 37185_at | serine (or cysteine) | 108 | 137166_r_at | AI327311 | NM_011111 | NP_035241 | 1 61.1 cM |
| | inhibitor | | proteinase inhibitor, | | | | | | |
| | | | clade B (ovalbumin), | | | | | | |
| | | | member 2 | | | | | | |
| 22 | proteinase | 37185_at | serine (or cysteine) | 109 | 92978_s_at | X16490 | NM_011111 | NP_035241 | 1 61.1 cM |
| | inhibitor | | proteinase inhibitor, | | | | | | |
| | | | clade B (ovalbumin), | | | | | | |
| | | | member 2 | | | | | | |
| 24 | signal | 32005_at | pro-melanin-concen- | 110 | 163453_at | AI596769 | — | — | — |
| | transduction | | trating hormone | | | | | | |
| 24 | signal | 32005_at | pro-melanin-concen- | 111 | 166475_r_at | AV146353 | — | — | — |
| | transduction | | trating hormone | | | | | | |
| 24 | signal | 33291_at | RAS guanyl releasing | 112 | 98307_at | AF106070 | NM_011246 | NP_035376 | 2 65.0 cM |
| | transduction | | protein 1 | | | | | | |
| 24 | signal | 33291_at | RAS guanyl releasing | 113 | 167498_i_at | AV313053 | NM_011246 | NP_035376 | 2 65.0 cM |
| | transduction | | protein 1 | | | | | | |
| 24 | signal | 37014_at | myxovirus (influenza | 114 | 98417_at | M21038 | NM_010846 | NP_034976 | 16 71.2 cM |
| | transduction | | virus) resistance 1, | | | | | | |
| | | | interferon-inducible | | | | | | |
| | | | protein p78 (mouse) | | | | | | |
| 24 | signal | 37890_at | CD47 antigen (Rh- | 115 | 103611_at | AB012693 | NM_010581 | NP_034711 | 16 |
| | transduction | | related antigen, | | | | | | |
| | | | integrin-associated | | | | | | |
| | | | signal transducer) | | | | | | |
| 24 | signal | 879_at | myxovirus (influenza | 116 | 102699_at | J03368 | NM_013606 | NP_038634 | 16 71.2 cM |
| | transduction | | virus) resistance 2 | | | | | | |
| | | | (mouse) | | | | | | |

| | mouse | | | MASM5 | | | | | | |
|---|---|---|---|---|---|---|---|---|---|---|
| | chip | homo- | | | 1 st | | 2nd | | 3 rd | |
| cat# | ID | logy | name | 1st | P/A | 2nd | P/A | 3rd | P/A | reference |
| 22 | — | 60.00% | squamous cell carcinoma | — | | — | | — | | Genomics 54 (2), 297- |
| | | | antigen 2 | | | | | | | 306 (1998) |
| 22 | B | 85.12% | fetuin beta Putative | 1.2 | A | 0.278 | A | 0.714 | A | Hum. Mol. Genet. 6: 259- |
| | | | Ortholog (highly | | | | | | | 265 (1997) |
| | | | conserved) | | | | | | | |
| 22 | B | 85.12% | fetuin beta Putative | 1.2 | A | 0.278 | A | 0.714 | A | Hum. Mol. Genet. 6: 259- |
| | | | Ortholog (highly | | | | | | | 265 (1997) |
| | | | conserved) | | | | | | | |
| 22 | A | | serine (or cysteine) | 1.1 | P | 0.714 | P | 0.714 | P | J. Biol. Chem. 270: 16039- |
| | | | proteinase inhibitor, | | | | | | | 16096 (1995) |
| | | | clade B (ovalbumin), | | | | | | | |
| | | | member 6 Curated | | | | | | | |
| | | | Ortholog | | | | | | | |
| 22 | B | 100.00% | DEAD (aspartate- | 0.909 | P | 0.714 | P | 1.4 | P | Life Sci. 52: 917-926 (1993) |
| | | | glutamate-alanine- | | | | | | | |
| | | | aspartate) box | | | | | | | |
| | | | polypeptide 5 | | | | | | | |
| | | | Putative Ortholog | | | | | | | |
| 22 | A | 100.00% | DEAD (aspartate- | 1 | P | 1 | P | 1.1 | P | Life Sci. 52: 917-926 (1993) |
| | | | glutamate-alanine- | | | | | | | |
| | | | aspartate) box | | | | | | | |
| | | | polypeptide 5 | | | | | | | |
| | | | Putative Ortholog | | | | | | | |
| 22 | C | 84.17% | serine (or cysteine) | 0.667 | A | 0.667 | A | 1.2 | A | EMBO J. 8: 3287-3294 (1989) |
| | | | proteinase inhibitor, | | | | | | | |
| | | | clade B (ovalbumin), | | | | | | | |
| | | | member 2 Curated | | | | | | | |
| | | | Ortholog | | | | | | | |
| 22 | A | 84.17% | serine (or cysteine) | 2.1 | P | 0.455 | P | 1.7 | A | EMBO J. 8: 3287-3294 (1989) |
| | | | proteinase inhibitor, | | | | | | | |
| | | | clade B (ovalbumin), | | | | | | | |
| | | | member 2 Putative | | | | | | | |
| | | | Ortholog (highly | | | | | | | |
| | | | conserved) | | | | | | | |
| 24 | B | 87.54% | RIKEN cDNA A2301D9K23 | 1.6 | A | 1.4 | A | 1.4 | A | — |
| | | | gene Putative | | | | | | | |
| | | | Ortholog (highly | | | | | | | |
| | | | conserved) | | | | | | | |
| 24 | C | 87.54% | RIKEN cDNA A2301D9K23 | 1.2 | A | 0.556 | A | 0.714 | A | — |
| | | | gene Putative Ortholog | | | | | | | |
| | | | (highly conserved) | | | | | | | |
| 24 | A | | RAS guanyl releasing | 0.5 | A | 1.7 | M | 1.3 | A | Unpublished: - ( ) |
| | | | protein 1 Curated | | | | | | | |
| | | | Ortholog | | | | | | | |
| 24 | C | | RAS guanyl releasing | 0.833 | A | 1.6 | A | 2.4 | A | Unpublished: - ( ) |
| | | | protein 1 Curated | | | | | | | |
| | | | Ortholog | | | | | | | |
| 24 | A | | myxovirus (influenza | 1.1 | A | 2.2 | A | 3 | A | Cell 44: 147-158 (1986) |
| | | | virus) resistance 1 | | | | | | | |
| | | | Curated Ortholog | | | | | | | |
| 24 | A | | integrin-associated | 1 | P | 1 | P | 1 | P | J. Cell Biol. 123: 485- |
| | | | protein Curated | | | | | | | 496 (1993) |
| | | | Ortholog | | | | | | | |
| 24 | A | 89.60% | myxovirus (influenza | 1.2 | A | 0.909 | P | 1.3 | A | Mol. Cell. Biol. 8: 4524- |
| | | | virus) resistance 2 | | | | | | | 4528 (1988) |
| | | | Putative Ortholog | | | | | | | |

[0553] TABLE 48

| | | | | | | | | | |
|---|---|---|---|---|---|---|---|---|---|
| 24 | signal | 879_at | myxovirus (influenza virus) | 115 | 98417_at | M21038 | NM_010846 | NP_034976 | 16 71.2 cM |
| | transduction | | resistance 2 (mouse) | | | | | | |

| | | | | | | | | | |
|---|---|---|---|---|---|---|---|---|---|
| 24 | A | myxovirus (influenza virus) resistance | 1.1 | A | 2.2 | A | 3 | A | Cell 44: 147- |
| | | 1 Curated Ortholog | | | | | | | 158 (1986) |

| | | | | mouse | | | | | |
|---|---|---|---|---|---|---|---|---|---|
| | | human | | | mouse | | mouse_Ref | mouse_Ref | mouse_Map |
| cat# | category | Probe ID | title | # | Probe ID | GenBank | Seq | SeqP | Location |
| 25 | structural | 39951_at | plastin 1 | | — | AI427122 | — | — | — |
| | protein | | | | | | | | |
| 25 | structural | 601_s_at | keratin type 16 | 117 | 164428_i_at | AV085754 | NM_008470 | NP_032496 | 11 D |
| | protein | | gene, exon 8 | | | | | | |
| 25 | structural | 601_s_at | keratin type 16 | 118 | 103589_at | AF053235 | NM_008470 | NP_032456 | 11 D |
| | protein | | gene, exon 6 | | | | | | |
| 26 | transcription | 32859_at | signal transducer | 119 | 101465_at | U06924 | NM_009283 | NP_033309 | 1 25.9 cM |
| | factor | | and activator of | | | | | | |
| | | | transcription 1, | | | | | | |
| | | | 91 kD | | | | | | |
| 26 | transcription | 32859_at | signal transducer | 120 | 114635_at | AA960121 | NM_009283 | NP_033309 | 1 25.9 cM |
| | factor | | and activator of | | | | | | |
| | | | transcription 1, | | | | | | |
| | | | 91 kD | | | | | | |
| 26 | transcription | 32860_g_at | signal transducer | 119 | 101465_at | U06924 | NM_009283 | NP_033309 | 1 25.9 cM |
| | factor | | and activator of | | | | | | |
| | | | transcription 1, | | | | | | |
| | | | 91 kD | | | | | | |
| 26 | transcription | 32860_g_at | signal transducer | 120 | 114635_at | AA960121 | NM_009283 | NP_033309 | 1 25.9 cM |
| | factor | | and activator of | | | | | | |
| | | | transcription 1, | | | | | | |
| | | | 91 kD | | | | | | |
| 26 | transcription | 33338_at | STAT1 | 119 | 101465_at | U06924 | NM_009283 | NP_033309 | 1 25.9 cM |
| | factor | | | | | | | | |
| 26 | transcription | 33339_g_at | STAT1 | 119 | 101465_at | U06924 | NM_009283 | NP_033309 | 1 25.9 cM |
| | factor | | | | | | | | |
| 26 | transcription | 32961_at | c-myc promoter- | 121 | 93281_at | AF049125 | NM_011992 | NP_036122 | 9 |
| | factor | | binding protein | | | | | | |
| 26 | transcription | 33288_i_at | zinc finger protein | 122 | 109154_at | AW121894 | — | — | 16 |
| | factor | | 263 | | | | | | |
| 26 | transcription | 35432_at | RNA polymerase II | | — | AK005232 | NM_027213 | NP_081489 | 12 |
| | factor | | transcriptional | | | | | | |
| | | | regulation mediator | | | | | | |
| | | | (Med6) | | | | | | |
| 26 | transcription | 36412_s_at | interferon regulatory | | — | U73037 | NM_016850 | NP_058546 | 7 F4 |
| | factor | | factor 7B mRNA | | | | | | |
| 26 | transcription | 37544_at | nuclear factor, | 123 | 164758_i_at | AV222614 | NM_017373 | NP_059069 | 13 32.0 cM |
| | factor | | interleukin 3 | | | | | | |
| | | | regulated | | | | | | |
| 27 | transporter | 36376_at | pendrin | | — | AF167411 | NM_011867 | NP_035997 | 12 B1 |
| 27 | transporter | 41038_at | neutrophil cytosolic | 126 | 102326_at | AB002664 | NM_010877 | NP_035007 | 1 76.1 cM |
| | | | factor 2 | | | | | | |

| | mouse | | | MASM5 | | | | | | |
|---|---|---|---|---|---|---|---|---|---|---|
| | chip | homo- | | | 1 st | | 2nd | | 3 rd | |
| cat# | ID | logy | name | 1st | P/A | 2nd | P/A | 3rd | P/A | reference |
| 25 | — | 89.30% | expressed sequence AI427122 | — | | — | | — | | — |
| | | | (AI427122) | | | | | | | |
| 25 | B | | keratin complex 1, acidic, | 1.5 | A | 1.6 | A | 0.625 | A | J. Biol. Chem. 273: 32265- |
| | | | gene 16 Curated Ortholog | | | | | | | 32272 (1998) |
| 25 | A | | keratin complex 1, acidic, | 1.8 | A | 1.3 | A | 1.1 | A | J. Biol. Chem. 273: 32265- |
| | | | gene 16 Curated Ortholog | | | | | | | 32272 (1998) |
| 26 | A | | signal transducer and activator of | 1.8 | P | 1.6 | P | 1 | P | Science 264: 95-98 |
| | | | transcription 1 Curated Ortholog | | | | | | | (1994) |
| 26 | B | | signal transducer and activator of | 2 | P | 1.9 | P | 1.1 | P | Science 264: 95-98 |
| | | | transcription 1 Curated Ortholog | | | | | | | (1994) |
| 26 | A | | signal transducer and activator of | 1.8 | P | 1.6 | P | 1 | P | Science 264: 95-98 |
| | | | transcription 1 Curated Ortholog | | | | | | | (1994) |
| 26 | B | | signal transducer and activator of | 2 | P | 1.9 | P | 1.1 | P | Science 264: 95-98 |
| | | | transcription 1 Curated Ortholog | | | | | | | (1994) |
| 26 | A | | signal transducer and activator of | 1.8 | P | 1.6 | P | 1 | P | Science 264: 95-93 |
| | | | transcription 1 Curated Ortholog | | | | | | | (1994) |
| 26 | A | | signal transducer and activator of | 1.8 | P | 1.6 | P | 1 | P | Science 264: 95-98 |
| | | | transcription 1 Curated Ortholog | | | | | | | (1994) |
| 26 | A | 90.68% | reticulocalbin 2 Putative Ortholog | 0.909 | P | 0.833 | P | 0.909 | P | J. Neurochem., 64: 2339- |
| | | | (highly conserved) | | | | | | | 2344 (1995) |
| 26 | B | 84.57% | zinc finger protein 263 Putative | 0.769 | P | 0.833 | P | 1.3 | P | — |
| | | | Ortholog | | | | | | | |
| 26 | — | | RIKEN cDNA 1500D12F11 gene | — | | — | | — | | Meth. Enzymol. 303, 19- |
| | | | | | | | | | | 44 (1999) |
| 26 | — | 79.90% | interferon regulatory factor | — | | — | | — | | Meth. Enzymol. 303, 19- |
| | | | 7 (lrf7) | | | | | | | 44 (1999) |
| 26 | B | 87.50% | nuclear factor, interleukin 3, | 1.4 | A | 0.714 | A | 1.3 | A | Proc. Natl. Acad. Sci. |
| | | | regulated Curated Ortholog | | | | | | | U.S.A. 94: 2609-2614 |
| | | | | | | | | | | (1997) |
| 27 | — | | solute carrier family 26, member 4 | — | | — | | — | | — |
| | | | (Slc26a4) | | | | | | | |
| 27 | A | | neutrophil cytosolic factor 2 | 2 | M | 2.2 | P | 1.2 | P | Eur. J. Biochem. 251: 573- |
| | | | Curated Ortholog | | | | | | | 582 (1998) |

[0554] TABLE 49

| | | | | mouse | | | | | |
|---|---|---|---|---|---|---|---|---|---|
| | | | | | | | mouse_{—} | mouse_{—} | |
| | | human | | | mouse | | Ref | Ref | mouse_Map |
| cat # | category | Probe ID | title | # | Probe ID | GenBank | Seq | SeqP | Location |
| 2 | cell adhesion | 46916_at | cadherin-like | | none | | | | |
| | | | protein VR20 | | | | | | |
| 2 | cell adhesion | 57421_at | cadherin 6, type | 1 | 101730_at | D82029 | NM_007666 | P_031692 | — |
| | | | 2, K-cadherin | | | | | | |
| | | | (fetal kidney) | | | | | | |
| 4 | chemokine | 44095_at | chemokine (C-X-C | 2 | 160596_at | AW050048 | NM_025397 | NP_079673 | — |
| | | | motif) ligand 16 | | | | | | |
| 4 | chemokine | 44095_at | chemokine (C-X-C | 3 | 163760_at | AW122516 | NM_023158 | NP_075647 | — |
| | | | motif) ligand 16 | | | | | | |
| 4 | chemokine | 44095_at | chemokine (C-X-C | 4 | 134771_at | AI606877 | NM_023158 | NP_075647 | — |
| | | | motif) ligand 16 | | | | | | |
| 4 | chemokine | 44095_at | chemokine (C-X-C | 5 | 165377_r_at | AV062836 | NM_023158 | NP_075647 | — |
| | | | motif) ligand 16 | | | | | | |
| 5 | cytokine | 47855_at | interleukin 19 | | none | | | | |
| | related | | | | | | | | |
| 6 | cytosolic | 47634_at | heat shock 70 kD | 6 | 103471_at | AI194333 | NM_025706 | NP_079982 | — |
| | protein | | protein 5 (glucose- | | | | | | |
| | | | regulated protein, | | | | | | |
| | | | 78 kD) | | | | | | |
| 6 | cytosolic | 47634_at | heat shock 70 kD | 7 | 101955_at | AJ002387 | NM_022310 | NP_071705 | 2 22.5 Cm |
| | protein | | protein 5 (glucose- | | | | | | |
| | | | regulated protein, | | | | | | |
| | | | 78 kD) | | | | | | |
| 6 | cytosolic | 47634_at | heat shock 70 kD | 8 | 162445_at | AV351546 | NM_022310 | NP_071705 | 2 22.5 Cm |
| | protein | | protein 5 (glucose- | | | | | | |
| | | | regulated protein, | | | | | | |
| | | | 78 kD) | | | | | | |
| 7 | enzyme | 43394_s_at | fatty acid | 9 | 167028_at | AI841650 | NM_021890 | NP_068690 | — |
| | | | desaturase 3 | | | | | | |
| 7 | enzyme | 43394_s_at | fatty acid | 10 | 168721_r_at | AV235789 | NM_021890 | NP_068690 | — |
| | | | desaturase 3 | | | | | | |
| 7 | enzyme | 48918_at | nitric oxide | 11 | 104420_at | U43428 | NM_010927 | NP_035057 | 11 45.6 cM |
| | | | synthase 2A | | | | | | |
| | | | (inducible, | | | | | | |
| | | | hepatocytes) | | | | | | |
| 7 | enzyme | 51920_at | melanoma | 12 | 103446_at | AAA959954 | NM_027835 | NP_082111 | — |
| | | | differentiation | | | | | | |
| | | | associated | | | | | | |
| | | | protein-5 | | | | | | |
| 7 | enzyme | 54604_at | hyaluronan | 13 | 99394_at | U86408 | NM_008217 | NP_032243 | 8 53.3 cM |
| | | | synthase 3 | | | | | | |

| | mouse | | | MASM5 | | | | | | |
|---|---|---|---|---|---|---|---|---|---|---|
| | chip | homo- | | | 1 st | | 2nd | | 3 rd | |
| cat # | ID | logy | name | 1st | P/A | 2nd | P/A | 3rd | P/A | reference |
| 2 | | | | — | | — | | — | | |
| 2 | A | | cadherin 6 Curated Ortholog | 0.83 | A | 1.1 | A | 0.71 | P | Dev. Biol. 183: 183- |
| | | | | | | | | | | 194 (1997) |
| 4 | A | 0.9275 | RIKEN cDNA 1110030J09 gene | 1 | P | 0.77 | P | 0.77 | P | Meth. Enzymol. 303: 19-44 |
| | | | Putative Ortholog (highly | | | | | | | (1999) |
| | | | conserved) | | | | | | | |
| 4 | B | | Cxc chemokine ligand 16 | 1.3 | P | 1.1 | P | 1.1 | P | Meth. Enzymol. 303: 19-44 |
| | | | Curated Ortholog | | | | | | | (1999) |
| 4 | C | | Cxc chemokine ligand 16 | 1.3 | P | 1.3 | P | 1.3 | A | Meth. Enzymol. 303: 19-44 |
| | | | Curated Ortholog | | | | | | | (1999) |
| 4 | B | | Cxc chemokine ligand 16 | 1.3 | A | 0.91 | A | 1.4 | A | Meth. Enzymol. 303: 19-44 |
| | | | Curated Ortholog | | | | | | | (1999) |
| 5 | | | | — | | — | | — | | |
| 6 | A | 0.9401 | RIKEN cDNA 4432405K22 gene | 1.5 | P | 0.83 | P | 1.1 | P | Meth. Enzymol. 303: 19-44 |
| | | | Putative Ortholog | | | | | | | (1999) |
| 6 | A | | heat shock 70 kD protein 5 | 1 | P | 1.7 | P | 1.6 | P | Proc. Natl. Acad. Sci. U.S.A. |
| | | | (glucose-regulated protein, | | | | | | | 85: 2250-2254 (1988) |
| | | | 78 kD) Curated Ortholog | | | | | | | |
| 6 | A | | heat shock 70 kD protein 5 | 0.77 | A | 0.59 | A | 0.77 | A | Proc. Natl. Acad. Sci. U.S.A. |
| | | | (glucose-regulated protein, | | | | | | | 85: 2250-2254 (1988) |
| | | | 78 kD) Curated Ortholog | | | | | | | |
| 7 | C | 91.97% | fatty acid desaturase 3 Putative | 0.83 | P | 0.83 | P | 0.67 | P | Unpublished: - ( ) |
| | | | Ortholog (highly conserved) | | | | | | | |
| 7 | C | 91.97% | fatty acid desaturase 3 Putative | 1.7 | A | 0.67 | A | 0.77 | A | Unpublished: - ( ) |
| | | | Ortholog (highly conserved) | | | | | | | |
| 7 | A | | nitric oxide synthase 2, inducible, | 2.3 | P | 1.1 | P | 0.71 | A | J. Biol. Chem. 267: 6370- |
| | | | macrophage Curated Ortholog | | | | | | | 6374 (1992) |
| 7 | A | 98.23% | RIKEN cDNA 9130009C22 gene | 2.2 | P | 1.2 | P | 0.91 | P | — |
| | | | Putative Ortholog | | | | | | | |
| 7 | A | 90.13% | hyaluronan synthase 3 Curated | 0.77 | A | 1.1 | A | 0.91 | A | J. Biol. Chem. 272: 8957- |
| | | | Ortholog | | | | | | | 8961 (1997) |

[0555] TABLE 50

| | | | | | | | | | |
|---|---|---|---|---|---|---|---|---|---|
| 7 | enzyme | 57151_at | ADP-ribosylation factor-like 7 | 14 | 108048_at | AI836268 | — | — | — |
| 7 | enzyme | 59215_at | RNA helicase | | none | | | | |
| 7 | enzyme | 51925_at | ESTs, Weakly similar to phosphatidylserine- | 15 | 110639_at | AW108146 | — | — | — |
| | | | specific phospholipase A1 deltaC [H. sapiens] | | | | | | |

| | | | | | | | | | | |
|---|---|---|---|---|---|---|---|---|---|---|
| 7 | B | 93.75% | ESTs Homolog | 0.77 | P | 1 | P | 0.83 | P | — |
| 7 | | | | | | | | | | |
| 7 | B | 84.09% | ESTs, Weakly similar to A34671 triacylglycerol lipase [M. musculus] | 0.71 | A | 0.24 | A | 0.83 | A | — |
| | | | Putative Ortholog | | | | | | | |

| | | | | mouse | | | | | |
|---|---|---|---|---|---|---|---|---|---|
| | | human | | | mouse | | mouse_Ref | mouse_Ref | mouse_Map |
| cat # | category | Probe ID | title | # | Probe ID | GenBank | Sea | SeqP | Location |
| 8 | hypothetical | 43366_at | hypothetical | 16 | 107112_at | AI121797 | — | — | — |
| | protein | | protein FLJ10261 | | | | | | |
| 8 | hypothetical | 43963_at | hypothetical | 16 | 107112_at | AI121797 | — | — | — |
| | protein | | protein FLJ10261 | | | | | | |
| 8 | hypothetical | 50209_at | hypothetical | 17 | 116662_at | AI843057 | — | — | — |
| | protein | | protein FLJ14281 | | | | | | |
| 8 | hypothetical | 50209_at | hypothetical | 18 | 163361_at | AA472475 | — | — | — |
| | protein | | protein FLJ14281 | | | | | | |
| 8 | hypothetical | 50209_at | hypothetical | 19 | 168478_s_at | AV366153 | — | — | — |
| | protein | | protein FLJ14281 | | | | | | |
| 8 | hypothetical | 53777_at | hypothetical | | — | BE687722 | — | — | — |
| | protein | | protein FLJ22693 | | | | | | |
| 8 | hypothetical | 56959_at | hypothetical | | none | | | | |
| | protein | | protein FLJ22332 | | | | | | |
| 8 | hypothetical | 57197_at | hypothetical | | — | AK020110 | NM_029999 | NP_084275 | — |
| | protein | | protein DKFZp566J091 | | | | | | |
| 8 | hypothetical | 58957_at | hypothetical | 20 | 113253_r_at | AI852111 | — | — | — |
| | protein | | protein FLJ20637 | | | | | | |
| 8 | hypothetical | 58957_at | hypothetical | 21 | 170461_i_at | AV209883 | — | — | — |
| | protein | | protein FLJ20637 | | | | | | |
| 8 | hypothetical | 58957_at | hypothetical | 22 | 115732_at | AI530075 | — | — | — |
| | protein | | protein FLJ20637 | | | | | | |
| 14 | MHC | 49203_f_at | hypothetical | | none | | | | |
| | | | protein DKFZp5471014 | | | | | | |
| 8 | hypothetical | 44127_at | Homo sapiens mRNA | 23 | 106644_at | AW047110 | NM_009370 | NP_033396 | 4 19.3 cM |
| | protein | | full length Insert | | | | | | |
| | | | cDNA clone EUROIMAGE | | | | | | |
| | | | 994846 | | | | | | |
| 8 | hypothetical | 44127_at | Homo sapiens mRNA | 24 | 92427_at | D25540 | NM_009370 | NP_033396 | 4 19.3 cM |
| | protein | | full length insert | | | | | | |
| | | | cDNA clone EUROIMAGE | | | | | | |
| | | | 994846 | | | | | | |
| 8 | hypothetical | 46658_at | Homo sapiens cDNA | | none | | | | |
| | protein | | FLJ31051 fis, clone | | | | | | |
| | | | HSYRA2000605, weakly | | | | | | |
| | | | similar to MYOSIN | | | | | | |
| | | | HEAVY CHAIN, CLONE | | | | | | |
| | | | 203 | | | | | | |
| 8 | hypothetical | 47087_at | Homo sapiens cDNA | | none | | | | |
| | protein | | FLJ25117 fis, clone | | | | | | |
| | | | CBR05757 | | | | | | |
| 8 | hypothetical | 48826_s_at | Homo sapiens mRNA: | | none | | | | |
| | protein | | cDNA DKF2p434D0818 | | | | | | |
| | | | (from clone | | | | | | |
| | | | DKFZp434D0818) | | | | | | |
| 8 | hypothetical | 52307_at | Homo sapiens mRNA | 23 | 106644_at | AW047110 | NM_009370 | NP_033396 | 4 19.3 cM |
| | protein | | full length insert | | | | | | |
| | | | cDNA clone EUROIMAGE | | | | | | |
| | | | 994846 | | | | | | |

| | mouse | | | MASM5 | | | | | | |
|---|---|---|---|---|---|---|---|---|---|---|
| | chip | homo- | | | 1 st | | 2 nd | | 3 rd | |
| cat # | ID | logy | name | 1st | P/A | 2nd | P/A | 3rd | P/A | reference |
| 8 | B | 88.10% | Mus musculus, clone | 1.2 | P | 1.6 | P | 1.4 | P | — |
| | | | MGC: 8241, mRNA, | | | | | | | |
| | | | complete cds Putative | | | | | | | |
| | | | Ortholog(highly | | | | | | | |
| | | | conserved) | | | | | | | |
| 8 | B | 88.10% | Mus musculus, clone | 1.2 | P | 1.6 | P | 1.4 | P | — |
| | | | MGC: 8241, mRNA, | | | | | | | |
| | | | complete cds Putative | | | | | | | |
| | | | Ortholog (highly | | | | | | | |
| | | | conserved) | | | | | | | |
| 8 | B | 91.34% | RIKEN cDNA 5730496F10 | 1.4 | A | 1.5 | A | 1.4 | A | — |
| | | | gene Putative Ortholog | | | | | | | |
| | | | (highly conserved) | | | | | | | |
| 8 | B | 91.34% | RIKEN cDNA 5730496F10 | 0.77 | P | 0.77 | P | 1 | P | — |
| | | | gene Putative Ortholog | | | | | | | |
| | | | (highly conserved) | | | | | | | |
| 8 | C | 91.34% | RIKEN cDNA 5730496F10 | 0.91 | P | 1.1 | P | 1.3 | P | — |
| | | | gene Putative Ortholog | | | | | | | |
| | | | (highly conserved) | | | | | | | |
| 8 | — | 99.60% | ESTs | — | | — | | — | | — |
| 8 | | | | — | | — | | — | | |
| 8 | — | | limb-bud and heart | — | | — | | — | | Meth. Enzymol. 303, 19- |
| | | | (Lbh-pending) | | | | | | | 44 (1999) |
| 8 | B | 89.19% | RIKEN cDNA 2510038N07 | 1.6 | P | 1.1 | A | 1.3 | A | — |
| | | | gene Putative Ortholog | | | | | | | |
| 8 | C | 89.19% | RIKEN cDNA 251003EN08 | 2.1 | A | 0.71 | A | 1.2 | A | — |
| | | | gene Putative Ortholog | | | | | | | |
| 8 | B | 89.19% | RIKEN cDNA 2510038N09 | 1.2 | A | 1.3 | A | 1.4 | A | — |
| | | | gene Putative Ortholog | | | | | | | |
| 14 | | | | — | | — | | — | | |
| 8 | B | 92.73% | transforming growth | 0.91 | P | 0.77 | P | 0.77 | P | Biochem. Biophys. Res. |
| | | | factor, beta receptor | | | | | | | Commun. 198: 1054-1062 |
| | | | 1 Homolog | | | | | | | (1994) |
| 8 | A | 92.73% | transforming growth | 2 | A | 0.36 | A | 1.2 | A | Biochem. Biophys. Res. |
| | | | factor, beta receptor | | | | | | | Commun. 198: 1054-1062 |
| | | | 1 Homolog | | | | | | | (1994) |
| 8 | | | | | | | | | | |
| 8 | | | | | | | | | | |
| 8 | | | | — | | — | | — | | |
| 8 | B | 92.73% | transforming growth | 0.91 | P | 0.77 | P | 0.77 | P | Biochem. Biophys. Res. |
| | | | factor, beta receptor | | | | | | | Commun. 198: 1054-1062 |
| | | | 1 Homolog | | | | | | | (1994) |

[0556] TABLE 51

| | | | | | | | | | |
|---|---|---|---|---|---|---|---|---|---|
| 8 | hypothetical | 52307_at | Homo sapiens mRNA full | 24 | 92427_at | D25540 | NM_009370 | NP_033396 | 4 19.3 cM |
| | protein | | length insert cDNA | | | | | | |
| | | | clone EUROIMAGE 994846 | | | | | | |
| 8 | hypothetical | 52327_s_at | Homo sapiens mRNA; cDNA | 25 | 102907_at | AW125043 | — | — | — |
| | protein | | DKFZp434G227 (from | | | | | | |
| | | | clone DKFZp434G227) | | | | | | |
| 8 | hypothetical | 52539_at | Homo sapiens mRNA full | 23 | 106644_at | AW047110 | NM_009370 | NP_033396 | 4 19.3 cM |
| | protein | | length insert cDNA | | | | | | |
| | | | clone EUROIMAGE 994846 | | | | | | |
| 8 | hypothetical | 52539_at | Homo sapiens mRNA full | 24 | 92427_at | D25540 | NM_009370 | NP_033396 | 4 19.3 cM |
| | protein | | length insert cDNA | | | | | | |
| | | | clone EUROIMAGE 994846 | | | | | | |
| 8 | hypothetical | 52622_at | Homo sapiens cDNA | | none | | | | |
| | protein | | FLJ11812 fis, clone | | | | | | |
| | | | HEMBA1006364 | | | | | | |
| 8 | hypothetical | 53010_at | Homo sapiens mRNA | 26 | 114794_at | AA693165 | — | — | — |
| | protein | | full length insert | | | | | | |
| | | | cDNA clone EUROIMAGE | | | | | | |
| | | | 2068071 | | | | | | |
| 8 | hypothetical | 53061_at | Homo sapiens cDNA: | | none | | | | |
| | protein | | FLJ21425 fis, clone | | | | | | |
| | | | COL04162 | | | | | | |
| 8 | hypothetical | 54033_at | Homo sapiens cDNA: | 27 | 92971_at | AW125849 | — | — | — |
| | protein | | FLJ22547 fis, clone | | | | | | |
| | | | HS100356 | | | | | | |
| 8 | hypothetical | 54886_at | Homo sapiens mRNA; | 28 | 102907_at | AW125043 | — | — | — |
| | protein | | cDNA DKFZp434G227 (from | | | | | | |
| | | | clone DKFZp434G227) | | | | | | |
| 8 | hypothetical | 54897_at | Homo sapiens cDNA | 29 | 114119_at | AW124823 | — | — | — |
| | protein | | FLJ31586 fis, clone | | | | | | |
| | | | NT2R12002211 | | | | | | |
| 8 | hypothetical | 57050_at | KIAA1268 protein | 30 | 112671_at | AW122101 | — | — | — |
| | protein | | | | | | | | |
| 8 | hypothetical | 59516_at | KIAA1268 protein | 30 | 112671_at | AW122101 | — | — | — |
| | protein | | | | | | | | |
| 8 | hypothetical | 57694_at | Homo sapiens cDNA: | | none | | | | |
| | protein | | FLJ22629 fis, clone | | | | | | |
| | | | HS106179 | | | | | | |
| 8 | hypothetical | 57696_at | Homo sapiens cDNA: | | none | | | | |
| | protein | | FLJ22629 fis, clone | | | | | | |
| | | | HS106180 | | | | | | |
| 8 | hypothetical | 59036_at | Homo sapiens cDNA | | none | | | | |
| | protein | | FLJ14241 fis, clone | | | | | | |
| | | | OVAR1000533 | | | | | | |

| | | | | | | | | | | |
|---|---|---|---|---|---|---|---|---|---|---|
| 8 | A | 92.73% | transforming growth factor, | 2 | A | 0.36 | A | 1.2 | A | Biochem. Biophys. Res. |
| | | | beta receptor 1 Homolog | | | | | | | Commun. 198: 1054-1062 |
| | | | | | | | | | | (1994) |
| 8 | A | 0.9395 | expressed sequence AV253284 | 1 | P | 0.83 | P | 0.83 | P | — |
| | | | Putative Ortholog | | | | | | | |
| 8 | B | 92.73% | transforming growth factor, | 0.91 | P | 0.77 | P | 0.77 | P | Biochem. Biophys. Res. |
| | | | beta receptor 1 Homolog | | | | | | | Commun. 198: 1054-1062 |
| | | | | | | | | | | (1994) |
| 8 | A | 92.73% | transforming growth factor, | 2 | A | 0.36 | A | 1.2 | A | Biochem. Biophys. Res. |
| | | | beta receptor 1 Homolog | | | | | | | Commun. 198: 1054-1062 |
| | | | | | | | | | | (1994) |
| 8 | | | | — | | — | | — | | |
| 8 | B | 90.60% | RIKEN cDNA 2310076E16 gene | 1 | P | 0.48 | A | 0.83 | A | — |
| | | | Putative Ortholog (highly | | | | | | | |
| | | | conserved) | | | | | | | |
| 8 | | | | — | | — | | — | | |
| 8 | A | 88.89% | RIKEN cDNA 2210012L08 gene | 0.77 | A | 1.3 | A | 1.1 | P | — |
| | | | Putative Ortholog (highly | | | | | | | |
| | | | conserved) | | | | | | | |
| 8 | A | 93.95% | expressed sequence AV253284 | 1 | P | 0.83 | P | 0.83 | P | — |
| | | | Putative Ortholog | | | | | | | |
| 8 | B | 92.44% | ESTs Putative Ortholog (highly | 1.3 | P | 1 | P | 0.71 | A | — |
| | | | conserved) | | | | | | | |
| 8 | B | 83.55% | clone MGC: 29390 IMAGE: 5065398, | 1.4 | P | 1.4 | P | 1.2 | P | — |
| | | | mRNA, complete cds Putative | | | | | | | |
| | | | Ortholog | | | | | | | |
| 8 | B | 83.66% | clone MGC: 29390 IMAGE: 5065398, | 1.4 | P | 1.4 | P | 1.2 | P | — |
| | | | mRNA, complete cds Putative | | | | | | | |
| | | | Ortholog | | | | | | | |
| 8 | | | | | | | | | | |
| 8 | | | | | | | | | | |
| 8 | | | | | | | | | | |

mouse

| | | human | | | mouse | | mouse_Ref | mouse_Ref | mouse_Map |
|---|---|---|---|---|---|---|---|---|---|
| cat # | category | Probe ID | title | # | Probe ID | GenBank | Seq | SeqP | Location |
| 9 | interferon- | 48864_at | interferon, alpha- | | none | | | | |
| | inducible | | inducible protein 27 | | | | | | |
| | protein | | | | | | | | |
| 9 | interferon- | 52615_at | guanylate binding | 31 | 95974_at | M55544 | NM_010259 | NP_034389 | 3 67.4 cM |
| | inducible | | protein 5 | | | | | | |
| | protein | | | | | | | | |
| 10 | kinase | 48035_at | A kinase (PRKA) | 32 | 101435_at | AF033275 | NM_009649 | NP_033779 | — |
| | | | anchor protein 2 | | | | | | |
| 10 | kinase | 51085_at | CamKI-like protein | | AA060013 | — | — | — | — |
| | | | kinase | | | | | | |

| | mouse | | | MASM5 | | | | | | |
|---|---|---|---|---|---|---|---|---|---|---|
| | chip | homo- | | | 1 st | | 2nd | | 3 rd | |
| cat # | ID | logy | name | 1st | P/A | 2nd | P/A | 3rd | P/A | reference |
| 9 | | | | — | | — | | — | | |
| 9 | A | 91.89% | guanylate nucleotide | 2.9 | P | 1.8 | P | 1.1 | P | Mol. Cell. Biol. 11: |
| | | | binding protein | | | | | | | 4717-4725 (1991) |
| | | | 1 Putative Ortholog | | | | | | | |
| 10 | A | 92.21% | A kinase anchor protein | 0.83 | P | 0.83 | P | 1 | P | J. Biol. Chem. 273: |
| | | | 2 Homolog | | | | | | | 6533-6541 (1998) |
| 10 | | 91.40% | ESTs | | | | | | | — |

[0557] TABLE 52

| | | | | | | | | | |
|---|---|---|---|---|---|---|---|---|---|
| 10 | kinase | 51923_at | sphingosine kinase 1 | 33 | 103839_at | AF064748 | NM_011451 | NP_035581 | — |
| 10 | kinase | 51923_at | sphingosine kinase 1 | 34 | 164777_i_at | AV250525 | NM_011451 | NP_035581 | — |
| 10 | kinase | 56474_at | protein kinase H11 | 35 | 162448_f_at | AV354094 | NM_030704 | NP_109629 | 5 59.0 cM |
| 10 | kinase | 56474_at | protein kinase H11 | 36 | 160139_at | AI848798 | NM_030704 | NP_109629 | 5 59.0 cM |

| | | | | | | | | | | |
|---|---|---|---|---|---|---|---|---|---|---|
| 10 | A | 97.32% | sphingosine kinase 1 Putative | 0.42 | A | 0.42 | A | 0.77 | A | J. Biol. Chem. 273 (37), 23722-23728 (1998) |
| | | | Ortholog (highly conserved) | | | | | | | |
| 10 | B | 97.32% | sphingosine kinase 1 Putative | 2.2 | A | 0.4 | A | 1.3 | A | J. Biol. Chem. 273 (37), 23722-23728 (1998) |
| | | | Ortholog (highly conserved) | | | | | | | |
| 10 | A | 90.48% | crystallin, alpha C Putative | 0.35 | A | 0.35 | A | 0.77 | A | Meth. Enzymol. 303: 19-44 (1999) |
| | | | Ortholog (highly conserved) | | | | | | | |
| 10 | A | 90.48% | crystallin, alpha C Putative | 0.5 | P | 0.83 | P | 0.91 | P | Meth. Enzymol. 303: 19-44 (1999) |
| | | | Ortholog (highly conserved) | | | | | | | |

| | | | | mouse | | | | | |
|---|---|---|---|---|---|---|---|---|---|
| | | human | | | mouse | | mouse_Ref | mouse_Ref | mouse_Map |
| cat | category | Probe ID | title | # | Probe ID | GenBank | Seq | SeqP | Location |
| 12 | membrane | 46260_31 | claudin 1 | 37 | 160415_at | AI604314 | NM_016674 | NP_057883 | — |
| | protein | | | | | | | | |
| 12 | membrane | 46260_at | claudin 1 | 38 | 97546_at | AF072127 | NM_016674 | NP_057883 | — |
| | protein | | | | | | | | |
| 12 | membrane | 50320_g_at | poliovirus receptor- | 39 | 99934_at | M80206 | NM_008990 | NP_033016 | 7 9.0 cM |
| | protein | | related 2 (herpesvirus | | | | | | |
| | | | entry mediator B) | | | | | | |
| 12 | membrane | 50320_g_at | poliovirus receptor- | 40 | 164850_f_at | AV369774 | NM_008990 | NP_033016 | 7 9.0 cM |
| | protein | | related 2 (herpesvirus | | | | | | |
| | | | entry mediator B) | | | | | | |
| 12 | membrane | 50320_g_at | poliovirus receptor- | 41 | 99933_at | D26107 | NM_008990 | NP_033016 | 7 9.0 cM |
| | protein | | related 2 (herpesvirus | | | | | | |
| | | | entry mediator B) | | | | | | |
| 12 | membrane | 51628_at | extracellular glycoprotein | 42 | 108811_at | AA981032 | — | — | — |
| | protein | | Ortholog EMILIN-2 | | | | | | |
| | | | precursor | | | | | | |
| 12 | membrane | 51628_at | extracellular glycoprotein | 43 | 170500_at | AV223427 | — | — | — |
| | protein | | Ortholog EMILIN-2 | | | | | | |
| | | | precursor | | | | | | |
| 16 | oncogenesis | 50388_at | malignant fibrous | 44 | 163337_at | AA727483 | — | — | — |
| | | | histiocytoma amplified | | | | | | |
| | | | sequence 1 | | | | | | |
| 16 | oncogenesis | 52167_at | B aggressive lymphoma | 45 | 109021_at | AW214142 | NM_030253 | NP_084529 | — |
| | | | gene | | | | | | |
| 17 | others | 44583_at | SAM domain and HD | 46 | 109915_at | AA170781 | NM_018851 | NP_061339 | — |
| | | | domain, 1 | | | | | | |
| 17 | others | 44583_at | SAM domain and HD | 47 | 103080_at | U15635 | NM_018851 | NP_061339 | — |
| | | | domain, 1 | | | | | | |
| 17 | others | 46278_at | chromosome 16 open | | AW742692 | — | — | — | — |
| | | | reading frame 5 | | | | | | |
| 17 | others | 48368_at | CGI-141 protein | 48 | 166458_at | AI431004 | NM_025872 | NP_080148 | — |

| | mouse | | | MASM5 | | | | | | |
|---|---|---|---|---|---|---|---|---|---|---|
| | chip | | | | 1 st | | 2nd | | 3 rd | |
| cat # | ID | homology | name | 1st | P/A | 2nd | P/A | 3rd | P/A | reference |
| 12 | A | 92.66% | claudin 1 Putative Ortholog | 1.1 | | 1.6 | | 1.4 | | J. Cell Biol. 141: 1539- |
| | | | (highly conserved) | | | | | | | 1550 (1998) |
| 12 | A | 92.66% | claudin 1 Putative Ortholog | 1.1 | | 0.53 | | 1.2 | | J. Cell Biol. 141: 1539- |
| | | | (highly conserved) | | | | | | | 1550 (1998) |
| 12 | A | | poliovirus sensitivity Curated | 1 | P | 0.77 | P | 0.71 | P | J. Virol. 66: 2807-2813 |
| | | | Ortholog | | | | | | | (1992) |
| 12 | B | | poliovirus sensitivity Curated | 1.5 | A | 3.1 | A | 3.1 | A | J. Virol. 66: 2807-2813 |
| | | | Ortholog | | | | | | | (1992) |
| 12 | A | | poliovirus sensitivity Curated | 1 | P | 1.2 | P | 1.1 | P | J. Virol. 66: 2807-2813 |
| | | | Ortholog | | | | | | | (1992) |
| 12 | B | 91.18% | ESTs, Moderately similar to | 1 | A | 1.3 | P | 1.1 | P | — |
| | | | extracellular glycoprotein | | | | | | | |
| | | | EMILIN-2 precursor Putative | | | | | | | |
| | | | Ortholog (highly conserved) | | | | | | | |
| 12 | C | 91.18% | ESTs, Moderately similar to | 2 | A | 0.48 | A | 0.91 | A | — |
| | | | extracellular glycoprotein | | | | | | | |
| | | | EMILIN-2 precursor Putative | | | | | | | |
| | | | Ortholog (highly conserved) | | | | | | | |
| 16 | B | 92.68% | ESTs, Highly similar to MASL1 | 0.77 | P | 1.1 | P | 1.1 | P | — |
| | | | [H. sapiens] Putative | | | | | | | |
| | | | Ortholog | | | | | | | |
| 16 | B | 87.70% | hypothetical protein, MGC: 7868 | 1.4 | P | 1.6 | P | 1.1 | P | Unpublished: - ( ) |
| | | | Putative Ortholog (highly | | | | | | | |
| | | | conserved) | | | | | | | |
| 17 | B | | SAM domain and HD domain, 1 | 1.2 | A | 0.3 | A | 1.1 | A | J. Leukoc. Biol. 57: 477- |
| | | | | | | | | | | 483 (1995) |
| 17 | A | | SAM domain and HO domain. 1 | 1.3 | P | 1.3 | P | 0.91 | P | J. Leukoc. Biol. 57: 477- |
| | | | | | | | | | | 483 (1995) |
| 17 | | 87.50% | expressed sequence AW742692 | — | | — | | — | | — |
| 17 | C | 95.04% | RIKEN cDNA 2310061A22 gene | 0.4 | A | 3.3 | A | 0.83 | A | Meth. Enzymol. 303: 19-44 |
| | | | Homolog | | | | | | | (1999) |

[0558] TABLE 53

| | | | | | | | | | |
|---|---|---|---|---|---|---|---|---|---|
| 17 | others | 48368_at | CGI-141 protein | 49 | 107906_at | AI316570 | NM_025872 | NP_080148 | — |
| 17 | others | 50094_at | serum deprivation response | 50 | 165304_at | AV245062 | NM_138741 | NP_620080 | — |
| | | | (phospnatidylserine- | | | | | | |
| | | | binding protein) | | | | | | |
| 17 | others | 50094_at | serum deprivation response | 51 | 160373_i_at | AI839175 | NM_138741 | NP_620080 | — |
| | | | (phosphatidylserine- | | | | | | |
| | | | binding protein) | | | | | | |
| 17 | others | 50396_at | chromosome 12 open reading | 52 | 111260_at | AI843809 | — | — | — |
| | | | frame 5 | | | | | | |
| 17 | others | 50396_at | chromosome 12 open reading | 53 | 166340_at | AA793651 | — | — | — |
| | | | frame 5 | | | | | | |
| 17 | others | 51236_at | NEDD8 ultimate buster-1 | 54 | 165319_at | AV270997 | NM_016736 | NP_058016 | — |
| 17 | others | 59657_at | chromosome 21 open reading | 55 | 168781_at | AV258801 | NM_020622 | NP_065647 | — |
| | | | frame 11 | | | | | | |
| 17 | others | 59657_at | chromosome 21 open reading | 56 | 161580_f_at | AV314820 | NM_016736 | NP_058016 | — |
| | | | frame 11 | | | | | | |
| 17 | others | 59657_at | chromosome 21 open reading | 57 | 100570_at | U27462 | NM_016736 | NP_058016 | — |
| | | | frame 11 | | | | | | |
| 17 | others | 52675_at | similar to junction- | | none | | | | |
| | | | mediating and regulatory | | | | | | |
| | | | protein p300 JMY | | | | | | |

| | | | | | | | | | | |
|---|---|---|---|---|---|---|---|---|---|---|
| 17 | B | 95.04% | RIKEN cDNA 2310061A22 gene | 0.83 | A | 1.2 | A | 0.59 | A | Meth. Enzymol. 303: 19- |
| | | | Homolog | | | | | | | 44 (1999) |
| 17 | B | 91.41% | ESTs, Weakly similar to polymerase 1- | 1.8 | A | 1.2 | A | 1.3 | A | Cell Growth Differ. 4: |
| | | | transcript release factor | | | | | | | 753-760 (1993) |
| | | | [M. musculus] Putative | | | | | | | |
| | | | Ortholog (highly conserved) | | | | | | | |
| 17 | A | 91.41% | ESTs, Weakly similar to polymerase 1- | 1 | P | 0.67 | P | 0.63 | P | Cell Growth Differ. 4: |
| | | | transcript release factor | | | | | | | 753-760 (1993) |
| | | | [M. musculus] Putative | | | | | | | |
| | | | Ortholog (highly conserved) | | | | | | | |
| 17 | B | 82.03% | ESTs, Weakly similar to S67185 | 1.9 | A | 1.9 | A | 1.5 | A | — |
| | | | hypothetical protein YOR283w - | | | | | | | |
| | | | yeast (Saccharomyces cerevisiae) | | | | | | | |
| | | | [S. cerevisiae] Putative | | | | | | | |
| | | | Ortholog | | | | | | | |
| 17 | C | 82.03% | ESTs, Weakly similar to S67185 | 0.33 | A | 1.6 | A | 0.4 | A | — |
| | | | hypothetical protein YOR283w - | | | | | | | |
| | | | yeast (Saccharomyces cerevisiae) | | | | | | | |
| | | | [S. cerevisiae] Putative | | | | | | | |
| | | | Ortholog | | | | | | | |
| 17 | B | 93.27% | RIKEN cDNA 4931404D21 gene | 2.4 | A | 1 | A | 0.91 | A | — |
| | | | Putative Ortholog | | | | | | | |
| 17 | C | 82.50% | RIKEN cDNA 9030624C24 gene | 0.44 | A | 0.91 | A | 0.91 | P | Genomics 78 (1-2), 46-54 |
| | | | Putative Ortholog | | | | | | | (2001) |
| 17 | A | | NY-REN-18 antigen Curated | 0.91 | A | 0.53 | A | 0.91 | A | Genome Res. 10: 1617-1630 |
| | | | Ortholog | | | | | | | (2000) |
| 17 | A | | NY-REN-18 antigen Curated | 0.77 | P | 0.83 | P | 0.91 | P | Genome Res. 10: 1617-1630 |
| | | | Ortholog | | | | | | | (2000) |
| 17 | | | | — | | — | | — | | |

| | | | | mouse | | | | | |
|---|---|---|---|---|---|---|---|---|---|
| | | human | | | mouse | | mouse_Ref | mouse_Ref | mouse_Map |
| cat | category | Probe ID | title | # | Probe ID | GenBank | Seq | SeqP | Location |
| 18 | P450 | 47627_at | cytochrome P45D, subfamily | 58 | 104550_at | AW123273 | NM_028775 | NP_083051 | |
| | | | IIS, polypeptide 1 | | | | | | |
| 20 | protein | 48838_s_at | JAK binding protein | 59 | 92832_at | U88325 | NM_009896 | NP_034026 | — |
| | binding | | | | | | | | |
| | protein | | | | | | | | |
| 20 | protein | 47500_i_at | c-myc promoter-binding | 60 | 93281_at | AF049125 | NM_011992 | NP_036122 | — |
| | binding | | protein | | | | | | |
| | protein | | | | | | | | |
| 21 | proteinase | 51972_at | ubiquitin specific | 61 | 95024_at | AW047653 | NM_011909 | NP_036039 | 6 56.0 cM |
| | | | protease 18 | | | | | | |

| | mouse | | | MASM5 | | | | | | |
|---|---|---|---|---|---|---|---|---|---|---|
| | chip | homo- | | | 1 st | | 2nd | | 3 rd | |
| cat # | ID | logy | name | 1st | P/A | 2nd | P/A | 3rd | P/A | reference |
| 18 | A | 87.01% | RIKEN cDNA 1200011C15 gene | 0.91 | P | 0.71 | P | 1 | P | Meth. Enzymol. 303, 19-44 |
| | | | Putative Ortholog | | | | | | | (1999) |
| 20 | A | 90.16% | cytokine inducible SH2- | 1.6 | A | 1.9 | A | 1.5 | P | Mol. Reprod. Dev. 43: 1-6 |
| | | | containing protein 1 Curated | | | | | | | (1996) |
| | | | Ortholog | | | | | | | |
| 20 | A | 90.68 | reticulocalbin 2 Putative | 0.91 | P | 0.83 | P | 0.91 | P | J. Neurochem. 64: 2339- |
| | | | Ortholog | | | | | | | 2344 (1995) |
| 21 | A | 87.96% | ubiquitin specific protease | 1.3 | P | 2.9 | P | 0.77 | P | Mol. Cell. Biol. 19: 3029- |
| | | | 18 Putative Ortholog | | | | | | | 3038 (1999) |

[0559] TABLE 54

| | | | | | | | | | |
|---|---|---|---|---|---|---|---|---|---|
| 24 | signal | 55059_at | cytokine inducible SH2-containing | 62 | 162383_r_at | AV248632 | NM_009895 | NP_034025 | 9 59.0 cM |
| | transduction | | protein | | | | | | |
| 24 | signal | 55059_at | cytokine inducible SH2-containing | 63 | 100022_at | D89613 | NM_009895 | NP_034025 | 9 59.0 cM |
| | transduction | | protein | | | | | | |
| 24 | signal | 55107_at | EH-domain containing 3 | 64 | 115396_at | AW212285 | NM_020578 | NP_065603 | — |
| | transduction | | | | | | | | |
| 24 | signal | 59759_i_at | 4-1BB-mediated signaling molecule | 65 | 163326_i_at | AI616268 | NM_027178 | NP_081454 | — |
| | transduction | | | | | | | | |

| | | | | | | | | | | |
|---|---|---|---|---|---|---|---|---|---|---|
| 24 | A | 87.36% | cytokine inducible SH2-containing protein | 0.24 | A | 1.7 | A | 0.12 | A | EMBO J. 14: 2816-2826 (1995) |
| | | | Curated Ortholog | | | | | | | |
| 24 | A | 87.36% | cytokine inducible SH2-containing protein | 1.2 | P | 1.6 | P | 1.5 | P | EMBO J. 14: 2816-2826 (1995) |
| | | | Curated Ortholog | | | | | | | |
| 24 | B | 90.91% | EH-domain containing 3 Homolog | 0.23 | A | 0.48 | A | 0.77 | A | Unpublished: - ( ) |
| 24 | B | 86.42% | RIKEN cDNA 2410005L11 gene Homolog | 1.1 | A | 1.3 | A | 0.71 | A | Meth. Enzymol. 303, 19-44 (1999) |

| | | | | mouse | | | | | |
|---|---|---|---|---|---|---|---|---|---|
| cat | | human | | | mouse | | mouse_Ref | mouse_Ref | mouse_Map |
| # | category | Probe ID | title | # | Probe ID | GenBank | Seq | SeqP | Location |
| 25 | structural | 48684_at | type 1 intermediate filament | 66 | 163157_at | AI606261 | NM_033373 | NP_203537 | — |
| | protein | | cytokeratin | | | | | | |
| 26 | transcription | 43350_f_at | interferon regulatory factor 7 | | — | — | NM_016850 | NP_058546 | 7 F4 |
| | factor | | | | | | | | |
| 26 | transcription | 48587_at | Kruppel-like factor 4 (gut) | 67 | 161185_i_at | AV235936 | NM_010637 | NP_034767 | 4 19.7 cM |
| | factor | | | | | | | | |
| 26 | transcription | 48587_at | Kruppel-like factor 4 (gut) | 68 | 99622_at | U20344 | NM_010637 | NP_034767 | 4 19.7 cM |
| | factor | | | | | | | | |
| | | 42302_at | ESTs | | none | | | | |
| | | 42721_at | ESTs | | none | | | | |
| | | 43438_at | wd83d12.x1 Homo sapiens cDNA, | | none | | | | |
| | | | 3′ end /clone = IMAGE-2338199 | | | | | | |
| | | 45608_at | ESTs | 69 | 161081_at | AA733664 | — | — | — |
| | | 46120_at | ESTs | | none | | | | |
| | | 46378_at | ESTs | | none | | | | |
| | | 47252_at | Homo sapiens cDNA, 3′ end | | none | | | | |
| | | 47390_at | ESTs | | none | | | | |
| | | 51024_at | ESTs | | none | | | | |
| | | 54922_at | ESTs | 70 | 95020_at | AI848868 | — | — | — |
| | | 55491_at | ESTs | | none | | | | |

| | mouse | | | MASM5 | | | | | | |
|---|---|---|---|---|---|---|---|---|---|---|
| cat | chip | homo- | | | 1 st | | 2nd | | 3 rd | |
| # | ID | logy | name | 1st | P/A | 2nd | P/A | 3rd | P/A | reference |
| 25 | B | | type 1 intermediate filament | 1.5 | P | 0.77 | P | 1.4 | P | Unpublished: - ( ) |
| | | | cytokeratin Curated Ortholog | | | | | | | |
| 26 | — | 79.90% | interferon regulatory factor 7 | — | | — | | — | | Meth. Enzymol. 303, 19-44 |
| | | | | | | | | | | (1999) |
| 26 | A | 89.29% | Kruppel-like factor 4 (gut) Putative | 0.77 | A | 1.5 | A | 1 | A | J. Biol. Chem. 271: 9-20017 |
| | | | Ortholog (highly conserved) | | | | | | | (2000) |
| 26 | A | 89.29% | Kruppel-like factor 4 (gut) Putative | 1 | P | 0.83 | P | 0.77 | P | J. Biol. Chem. 271: 9-20017 |
| | | | Ortholog (highly conserved) | | | | | | | (2000) |
| | | | | — | | — | | — | | |
| | | | | — | | — | | — | | |
| | | | | — | | — | | — | | |
| | A | 99.37% | ESTs Putative Ortholog (highly | 0.83 | P | 0.83 | P | 1.2 | P | — |
| | | | conserved) | | | | | | | |
| | | | | — | | — | | — | | |
| | | | | — | | — | | — | | |
| | | | | — | | — | | — | | |
| | | | | — | | — | | — | | |
| | | | | — | | — | | — | | |
| | A | 93.72% | RIKEN cDNA 9130415E20 gene | 0.91 | P | 0.91 | P | 0.83 | P | — |
| | | | Putative Ortholog (highly conserved) | | | | | | | |
| | | | | — | | — | | — | | |

[0560] TABLE 55

| | | | | mouse | | | | | |
|---|---|---|---|---|---|---|---|---|---|
| | | human | | | mouse | | mouse_Ref | mouse_Ref | mouse_Map |
| cat# | category | Probe ID | title | # | Probe ID | GenBank | Seq | SeqP | Location |
| 3 | cell cycles | 63347_at | enhancer of filamentation 1 (cas-like | 1 | 101469_at | AF009366 | NM_017464 | NP_059492 | 13 A4 |
| | | | docking; Crk-associated substrate | | | | | | |
| | | | related) | | | | | | |
| 5 | cytokine | 48656_at | C1q and tumor necrosis factor | 2 | 162349_i_at | AV173028 | NM_019959 | NP_064343 | 11 E2 |
| | related | | related protein 1 | | | | | | |
| 5 | cytokine | 48656_at | C1q and tumor necrosis factor | 3 | 162365_i_at | AV231477 | NM_019959 | NP_064343 | 11 E2 |
| | related | | related protein 1 | | | | | | |
| 5 | cytokine | 48656_at | C1q and tumor necrosis factor | 4 | 161549_f_at | AV246051 | NM_019959 | NP_064343 | 11 E2 |
| | related | | related protein 1 | | | | | | |
| 5 | cytokine | 48656_at | C1q and tumor necrosis factor | 5 | 103676_at | AI551306 | NM_019959 | NP_064343 | 11 E2 |
| | related | | related protein 1 | | | | | | |
| 5 | cytokine | 48656_at | C1q and tumor necrosis factor | 6 | 162487_f_at | AV122373 | NM_019959 | NP_064343 | 11 E2 |
| | related | | related protein 1 | | | | | | |
| 7 | enzyme | 62213_at | lysyl oxidase-like 4 | | — | AF338440 | NM_053083 | NP_444313 | 19 |
| 8 | hypothetical | 49146_at | DKFZP564I1171 protein | | none | | | | |
| | protein | | | | | | | | |
| 8 | hypothetical | 53497_at | FLJ23044 fis, clone LNG02454 | 7 | 114164_at | AW214638 | — | — | — |
| | protein | | | | | | | | |
| 8 | hypothetical | 56608_at | KIAA0592 protein | | none | | | | |
| | protein | | | | | | | | |
| 8 | hypothetical | 60001_at | hypothetical protein FLJ23132 | 8 | 110625_at | AI591648 | — | — | — |
| | protein | | | | | | | | |
| 8 | hypothetical | 60001_at | hypothetical protein FLJ23132 | 9 | 105356_at | AI607408 | — | — | — |
| | protein | | | | | | | | |
| 8 | hypothetical | 60001_at | hypothetical protein FLJ23132 | 10 | 112743_at | AI157595 | — | — | — |
| | protein | | | | | | | | |
| 8 | hypothetical | 60001_at | hypothetical protein FLJ23132 | 11 | 12061_at | AI465433 | — | — | — |
| | protein | | | | | | | | |

| | mouse | | | MASM5 | | | | | | |
|---|---|---|---|---|---|---|---|---|---|---|
| | chip | homo- | | | 1 st | | 2nd | | 3 rd | |
| cat# | ID | logy | name | 1st | P/A | 2nd | P/A | 3rd | P/A | reference |
| 3 | A | 85.77% | neural precursor cell expressed, | 1 | P | 0.7 | P | 0.8 | P | Biochem. Biophys. Res. |
| | | | developmentally down-regulated | | | | | | | Commun. 185: 1155-1161 |
| | | | gene 9 Putative Ortholog (highly | | | | | | | (1992) |
| | | | conserved) | | | | | | | |
| 5 | A | 87.29% | RIKEN cDNA 1600017K21 gene | 0.3 | A | 0.6 | A | 1.2 | A | Genome Res. 10: 1617-1630 |
| | | | Putative Ortholog (highly conserved) | | | | | | | (2000) |
| 5 | A | 87.29% | RIKEN cDNA 1600017K21 gene | 0.2 | A | 0.2 | A | 0.3 | A | Genome Res. 10: 1617-1630 |
| | | | Putative Ortholog (highly conserved) | | | | | | | (2000) |
| 5 | A | 87.29% | RIKEN CDNA 1600017K21 gene | 0.8 | A | 2.4 | A | 1.3 | A | Genome Res. 10: 1617-1630 |
| | | | Putative Ortholog (highly conserved) | | | | | | | (2000) |
| 5 | A | 87.29% | RIKEN cDNA 1600017K21 gene | 0.8 | A | 0.7 | A | 0.7 | A | Genome Res. 10: 1617-1630 |
| | | | Putative Ortholog (highly conserved) | | | | | | | (2000) |
| 5 | A | 87.29% | RIKEN cDNA 1600017K21 gene | 1.2 | A | 1 | M | 0.8 | A | Genome Res. 10: 1617-1630 |
| | | | Putative Orthotog (highly conserved) | | | | | | | (2000) |
| 7 | | 86.80% | lysyl oxidase-like 4 (Lox14) | — | | — | | — | | Genome Res. 10 (10), 1617- |
| | | | | | | | | | | 1630 (2000) |
| 8 | | | | — | | — | | — | | |
| 8 | B | 92.11% | ESTs Putative Ortholog | 1.4 | A | 1.3 | A | 0.8 | A | — |
| 8 | | | | — | | — | | — | | |
| 8 | B | 96.36% | RIKEN cDNA1700034P13 gene | 0.8 | P | 2.3 | M | 1.6 | A | — |
| | | | Putative Ortholog (highly conserved) | | | | | | | |
| 8 | B | 96.36% | RIKEN cDNA1700034P13 gene | 1.7 | P | 0.8 | P | 1.1 | A | — |
| | | | Putative Ortholog (highly conserved) | | | | | | | |
| 8 | B | 96.36% | RIKEN cDNA1700034P13 gene | 1 | P | 0.9 | P | 1 | P | — |
| | | | Putative Ortholog (highly conserved) | | | | | | | |
| 8 | B | 96.36% | RIKEN cDNA1700034P13 gene | 1.1 | P | 1.6 | P | 1.1 | A | — |
| | | | Putative Ortholog (highly conserved) | | | | | | | |

[0561] TABLE 56

| | | | | | | | | | |
|---|---|---|---|---|---|---|---|---|---|
| 8 | hypothetical | 60049_at | RNA-binding protein; FLJ20273 | 12 | 133797_at | AI118550 | NM_139065 | NP_620704 | 5 C3.1 |
| | protein | | | | | | | | |
| 8 | hypothetical | 60049_at | RNA-binding protein; FLJ20273 | 13 | 112296_at | AA759831 | NM_139065 | NP_620704 | 5 C3.1 |
| | protein | | | | | | | | |
| 8 | hypothetical | 63780_at | hypothetical protein FLJ11259 | 14 | 111841_at | AI527656 | — | — | — |
| | protein | | | | | | | | |
| 8 | hypothetical | 63780_at | hypothetical protein FLJ11259 | 15 | 133349_at | AI037551 | — | — | — |
| | protein | | | | | | | | |
| 8 | hypothetical | 63794_at | KIAA1404 protein | 16 | 102965_at | AW121646 | — | — | — |
| | protein | | | | | | | | |
| 8 | hypothetical | 65191_at | KIAA1268 protein | 17 | 112671_at | AW122101 | — | — | — |
| | protein | | | | | | | | |

| | | | | | | | | | | |
|---|---|---|---|---|---|---|---|---|---|---|
| 8 | C | 94.00% | hypothetical protein MGC18900 | 2.2 | A | 1.8 | A | 1.6 | A | Unpublished: - (2001) |
| | | | Putative Ortholog (highly conserved) | | | | | | | |
| 8 | B | 94.00% | hypothetical protein MGC18900 | 1.4 | P | 1.5 | P | 1.3 | P | Unpublished: - (2001) |
| | | | Putative Ortholog (highly conserved) | | | | | | | |
| 8 | B | 92.04% | RIKEN cDNA 1200002N14 gene | 1 | P | 0.8 | P | 1 | P | — |
| | | | Putative Ortholog (highly conserved) | | | | | | | |
| 8 | C | 92.04% | RIKEN cDNA 1200002N14 gene | 0.8 | A | 2.7 | A | 1.9 | A | — |
| | | | Putative Ortholog (highly conserved) | | | | | | | |
| 8 | A | 90.89% | ESTs, Highly similar to KIAA1404 | 0.8 | P | 0.8 | P | 0.8 | P | — |
| | | | protein [H. sapiens] Putative Ortholog | | | | | | | |
| | | | (highly conserved) | | | | | | | |
| 8 | B | 80.81% | ESTs, Weakly similar to T12540 | 1.4 | P | 1.4 | P | 1.2 | P | — |
| | | | hypothetical protein DKFZp434J214.1 | | | | | | | |
| | | | [H. sapiens] Putative Ortholog | | | | | | | |

| | | | | mouse | | | | | |
|---|---|---|---|---|---|---|---|---|---|
| | | human | | | mouse | | mouse_Ref | mouse_Ref | mouse_Map |
| cat# | category | Probe ID | title | # | Probe ID | GenBank | Seq | SeqP | Location |
| 9 | interferon- | 62130_at | 28 kD interferon responsive protein | | none | | | | |
| | inducible | | | | | | | | |
| | protein | | | | | | | | |
| 12 | membrane | 48799_at | neural proliferation, differentiation | 18 | 92626_at | X67209 | NM_008721 | NP_032747 | 2 A3 |
| | protein | | and control, 1 | | | | | | |
| 12 | membrane | 51776_s_at | epithelial protein up-regulated in | 19 | 96935_at | AW011791 | NM_026018 | NP_080294 | 4 D1 |
| | protein | | carcinoma, membrane associated | | | | | | |
| | | | protein 17 | | | | | | |
| 12 | membrane | 51776_s_at | epithelial protein up-regulated in | 20 | 162531_at | AW048375 | — | — | — |
| | protein | | carcinoma, membrane associated | | | | | | |
| | | | protein 17 | | | | | | |
| 12 | membrane | 59794_g_at | epithelial protein up-regulated in | 19 | 96935_at | AW011791 | NM_026018 | NP_080294 | 4 D1 |
| | protein | | carcinoma, membrane associated | | | | | | |
| | | | protein 17 | | | | | | |
| 12 | membrane | 59794_g_at | epithelial protein up-regulated in | 20 | 162531_at | AW048375 | — | — | — |
| | protein | | carcinoma, membrane associated | | | | | | |
| | | | protein 17 | | | | | | |
| 14 | MHC | 57280_f_at | major histocompatibility complex, | | none | | | | |
| | | | class I, B | | | | | | |
| 16 | oncogenesis | 65963_at | Melanoma associated gene | 21 | 107575_at | AA980835 | — | — | — |

| | mouse | | | MASM5 | | | | | | |
|---|---|---|---|---|---|---|---|---|---|---|
| | chip | homo- | | | 1 st | | 2nd | | 3 rd | |
| cat# | ID | logy | name | 1st | P/A | 2nd | P/A | 3rd | P/A | reference |
| 9 | | | | | | | | | | |
| 12 | A | 84.23% | neural proliferation, differentiation | 0.7 | A | 1.4 | P | 1 | P | J. Neurosci. Res. 36: 133-146 |
| | | | and control gene 1 Putative Ortholog | | | | | | | (1993) |
| | | | (highly conserved) | | | | | | | |
| 12 | A | | membrane-associated protein 17 | 1 | P | 0.9 | P | 1.1 | P | Meth. Enzymol. 303: 19-44 |
| | | | Curated Ortholog (highly conserved) | | | | | | | (1999) |
| 12 | B | 86.36% | BMP and activin membrane-bound | 1 | P | 0.8 | P | 0.8 | P | — |
| | | | inhibitor, homolog | | | | | | | |
| 12 | A | | membrane-associated protein 17 | 1 | P | 0.9 | P | 1.1 | P | Meth. Enzymol. 303: 19-44 |
| | | | Curated Ortholog (highly conserved) | | | | | | | (1999) |
| 12 | B | 86.36% | BMP and activin membrane-bound | 1 | P | 0.8 | P | 0.8 | P | — |
| | | | inhibitor, homolog | | | | | | | |
| 14 | | | | | | | | | | |
| 16 | B | 88.89% | RIKEN cDNA 2310075M15 gene | 0.9 | P | 0.8 | P | 0.8 | P | — |
| | | | Putative Ortholog | | | | | | | |

[0562] TABLE 57

| | | | | mouse | | | | | |
|---|---|---|---|---|---|---|---|---|---|
| | | human | | | mouse | | mouse_Ref | mouse_Ref | mouse_Map |
| cat# | category | Probe ID | title | # | Probe ID | GenBank | Seq | SegP | Location |
| 17 | others | 61871_r_at | WW45 protein | 22 | 169317_at | AV044941 | NM_022028 | NP_071311 | 12 C3 |
| 17 | others | 61871_r_at | WW45 protein | 23 | 111119_at | AA764217 | NM_022028 | NP_071311 | 12 C3 |
| 17 | others | 61871_r_at | WW45 protein | 24 | 111162_f_at | AA014158 | NM_022028 | NP_071311 | 12 C3 |
| 17 | others | 61871_r_at | WW45 protein | 25 | 114337_at | AW122502 | NM_022028 | NP_071311 | 12 C3 |
| 17 | others | 61871_r_at | WW45 protein | 26 | 112893_at | AI842196 | NM_022028 | NP_071311 | 12 C3 |
| 17 | others | 65587 at | WW45 protein | 22 | 169317_at | AV044941 | NM_022028 | NP_071311 | 12 C3 |
| 17 | others | 65587_at | WW45 protein | 23 | 111119_at | AA764217 | NM_022028 | NP_071311 | 12 C3 |
| 17 | others | 65587_at | WW45 protein | 24 | 111162_f_at | AA014158 | NM_022028 | NP_071311 | 12 C3 |
| 17 | others | 65587_at | WW45 protein | 25 | 114337_at | AW122502 | NM_022028 | NP_071311 | 12 C3 |
| 17 | others | 65587_at | WW45 protein | 26 | 112393_at | AI842196 | NM_022028 | NP_071311 | 12 C3 |
| 17 | others | 64368_s_at | leucine-rich repeat-containing 5 | 27 | 115316_at | AI550677 | — | — | — |
| 17 | others | 64368_s_at | leucine-rich repeat-containing 5 | 28 | 168371_f_at | AV254276 | — | — | — |
| 17 | others | 64368_s_at | leucine-rich repeat-containing 5 | 29 | 106262_at | AA914186 | — | — | — |
| 17 | others | 64368_s_at | leucine-rich repeat-containing 5 | 30 | 168490_at | AI662368 | — | — | — |
| 17 | others | 64714_at | H4 histone, family 2 | | none | | | | |
| 17 | others | 65706_at | HSPC019 protein | 31 | 114263_at | AW121271 | — | — | — |

| | mouse | | | MASM5 | | | | | | |
|---|---|---|---|---|---|---|---|---|---|---|
| | chip | homo- | | | 1 st | | 2nd | | 3 rd | |
| cat# | ID | logy | name | 1st | P/A | 2nd | P/A | 3rd | P/A | reference |
| 17 | C | 92.62% | WW domain-containing protein 3 | 1.4 | A | 0.8 | A | 1.8 | A | Biochem. Biophys. Res. |
| | | | Homolog | | | | | | | Commun. 276: 990-998 |
| | | | | | | | | | | (2000) |
| 17 | B | 92.62% | WW domain-containing protein 3 | 1 | A | 1.9 | A | 1.1 | A | Biochem. Biophys. Res. |
| | | | Homolog | | | | | | | Commun. 276: 990-998 |
| | | | | | | | | | | (2000) |
| 17 | B | 92.62% | WW domain-containing protein 3 | 1 | P | 0.6 | A | 1.1 | M | Biochem. Biophys. Res. |
| | | | Homolog | | | | | | | Commun. 276: 990-998 |
| | | | | | | | | | | (2000) |
| 17 | B | 92.62% | WW domain-containing protein 3 | 1 | P | 0.9 | P | 1.1 | P | Biochem. Biophys. Res. |
| | | | Homolog | | | | | | | Commun. 276: 990-998 |
| | | | | | | | | | | (2000) |
| 17 | B | 92.62% | WW domain-containing protein 3 | 1.1 | P | 1.2 | P | 0.9 | P | Biochem. Biophys. Res. |
| | | | Homolog | | | | | | | Commun. 276: 990-998 |
| | | | | | | | | | | (2000) |
| 17 | C | 92.62% | WW domain-containing protein 3 | 1.4 | A | 0.8 | A | 1.8 | A | Biochem. Biophys. Res. |
| | | | Homotog | | | | | | | Commun. 276: 990-998 |
| | | | | | | | | | | (2000) |
| 17 | B | 92.62% | WW domain-containing protein 3 | 1 | A | 1.9 | A | 1.1 | A | Biochem. Biophys. Res. |
| | | | Homolog | | | | | | | Commun. 276: 990-998 |
| | | | | | | | | | | (2000) |
| 17 | B | 92.62% | WW domain-containing protein 3 | 1 | P | 0.6 | A | 1.1 | M | Biochem. Biophys. Res. |
| | | | Homolog | | | | | | | Commun. 276: 990-998 |
| | | | | | | | | | | (2000) |
| 17 | B | 92.62% | WW domain-containing protein 3 | 1 | P | 0.9 | P | 1.1 | P | Biochem. Biophys. Res. |
| | | | Homolog | | | | | | | Commun. 276: 990-998 |
| | | | | | | | | | | (2000) |
| 17 | B | 92.62% | WW domain-containing protein 3 | 1.1 | P | 1.2 | P | 0.9 | P | Biochem. Biophys. Res. |
| | | | Homolog | | | | | | | Commun. 276: 990-998 |
| | | | | | | | | | | (2000) |
| 17 | B | 90.00% | Highly similar to hypothetical protein | 0.2 | A | 0.5 | A | 3.4 | A | — |
| | | | FLJ10470 [Homo sapiens] [H. sapiens] | | | | | | | |
| | | | Putative Ortholog (highly conserved) | | | | | | | |
| 17 | C | 90.00% | Highly similar to hypothetical protein | 1 | P | 1.1 | P | 1.2 | P | — |
| | | | FLJ10470 [Homo sapiens] [H. sapiens] | | | | | | | |
| | | | Putative Ortholog (highly conserved) | | | | | | | |
| 17 | B | 90.00% | Highly similar to hypothetical protein | 1 | P | 1.5 | P | 1.1 | P | — |
| | | | FLJ10470 [Homo sapiens] [H. sapiens] | | | | | | | |
| | | | Putative Ortholog (highly conserved) | | | | | | | |
| 17 | C | 90.00% | Highly similar to hypothetical protein | 1.6 | A | 0.8 | A | 1.9 | P | — |
| | | | FLJ10470 [Homo sapiens] [H. sapiens] | | | | | | | |
| | | | Putative Ortholog (highly conserved) | | | | | | | |
| 17 | | | | — | | — | | — | | |
| 17 | B | 91.43% | RIKEN cDNA 1200002H13 gene | 1 | P | 12 | P | 1.1 | P | — |
| | | | Putative Ortholog | | | | | | | |

[0563] TABLE 58

| | | | | | | | | | |
|---|---|---|---|---|---|---|---|---|---|
| 21 | proteinase | 63329_at | transmembrane protease, serine 2 | 32 | 109965_s_at | AA958946 | NM_015775 | NP_056590 | 16 |
| 21 | proteinase | 63329_at | transmembrane protease, serine 2 | 33 | 131180_at | AI607826 | NM_015775 | NP_056590 | 16 |
| 21 | proteinase | 63329_at | transmembrane protease, serine 2 | 34 | 164520_f_at | AV302474 | NM_015775 | NP_056590 | 16 |
| 21 | proteinase | 63866_at | cathepsin C | 35 | 101019_at | U74683 | NM_009982 | NP_034112 | 7 D3-E1.1 |
| 21 | proteinase | 63866_at | cathepsin C | 36 | 161251_f_at | AV316954 | NM_009982 | NP_034112 | 7 D3-E1.1 |
| 21 | proteinase | 63866_at | cathepsin C | 37 | 101020_at | AI842667 | NM_009932 | NP_034112 | 7 D3-E1.1 |

| | | | | | | | | | | |
|---|---|---|---|---|---|---|---|---|---|---|
| 21 | B | 85.12% | transmembrane protease, serine 2 Homolog | 1.2 | P | 1.2 | P | 1.1 | P | FEBS Lett. 468: 93-100 (2000) |
| 21 | C | 85.12% | transmembrane protease, serine 2 Homolog | 0.9 | A | 1.2 | A | 1.3 | A | FEBS Lett. 468: 93-100 (2000) |
| 21 | B | 85.12% | transmembrane protease, serine 2 Homolog | 1.2 | P | 1.4 | P | 1.2 | P | FEBS Lett. 468: 93-100 (2000) |
| 21 | A | | cathepsin C Curated Ortholog | 1.2 | P | 1.1 | P | 1 | P | Biochim. Biophys. Acta 1351 (3), 267-273 (1997) |
| 21 | A | | cathepsin C Curated Ortholog | 0.7 | A | 1 | A | 1.2 | A | Biochim. Biophys. Acta 1351 (3), 267-273 (1997) |
| 21 | A | | cathepsin C Curated Ortholog | 1.8 | A | 0.6 | A | 0.9 | A | Biochim. Biophys. Acta 1351 (3), 267-273 (1997) |

| | | | | mouse | | | | | |
|---|---|---|---|---|---|---|---|---|---|
| | | human | | | mouse | | mouse_Ref | mouse_Ref | mouse_Map |
| cat# | category | Probe ID | title | # | Probe ID | GenBank | Seq | SeqP | Location |
| 24 | signal | 63332_at | B7-H1 protein | | — | AF233517 | NM_021893 | NP_068693 | 19 C2 |
| | transduction | | | | | | | | |
| 25 | structural | 48684_at | type 1 intermediate fila- | 38 | 163157_at | AI606261 | NM_033373 | NP_203537 | 11 D |
| | protein | | ment cytokeratin | | | | | | |
| 25 | structural | 57654_s_at | slingshot 1 | 39 | 129268_at | AW122522 | — | — | — |
| | protein | | | | | | | | |
| | | 60246_at | Homo sapiens, clone | 40 | 103066_at | L32973 | NM_020557 | NP_065582 | 12 6.0 cM |
| | | | IMAGE: 4428577, mRNA, | | | | | | |
| | | | partial cds | | | | | | |
| | | 60246_at | Homo sapiens, clone | 41 | 161186_f_at | AV246064 | NM_020557 | NP_065582 | 12 6.0 cM |
| | | | IMAGE: 4428577, mRNA, | | | | | | |
| | | | partial cds | | | | | | |
| | | 62330_at | ESTs | | none | | | | |
| | | 62828_at | ESTs | | none | | | | |
| | | 65457_at | ESTs | | none | | | | |
| | | 66392_at | ESTs | | none | | | | |
| | | 66899_at | ESTs | | none | | | | |

| | mouse | | | MASM5 | | | | | | |
|---|---|---|---|---|---|---|---|---|---|---|
| | chip | homo- | | | 1 st | | 2nd | | 3 rd | |
| cat# | ID | logy | name | 1st | P/A | 2nd | P/A | 3rd | P/A | reference |
| 24 | — | | programmed cell death 1 ligand 1 | — | | — | | — | | J. Exp. Med. 192 (7), 1027- |
| | | | (Pdcd1lg1) | | | | | | | 1034 (2000) |
| 25 | B | 84.22% | type I intermediate filament | 1.5 | P | 0.8 | P | 1.4 | P | Unpublished: - ( ) |
| | | | cytokeratin Homolog | | | | | | | |
| 25 | C | 92.08% | ESTs Putative Ortholog (highly | 0.8 | A | 1 | P | 0.7 | A | — |
| | | | conserved) | | | | | | | |
| | A | 87.32% | thymidylate kinase family LPS- | 1.3 | A | 2.1 | A | 0.7 | A | Meth. Enzymol. 303: 19-44 |
| | | | inducible member Putative Ortholog | | | | | | | (1999) |
| | A | 87.32% | thymidylate kinase family LPS- | 0.8 | A | 1.6 | A | 1.4 | A | Meth. Enzymol. 303: 19-44 |
| | | | inducible member Putative Ortholog | | | | | | | (1999) |
| | | | | — | | — | | — | | |
| | | | | — | | — | | — | | |
| | | | | — | | — | | — | | |
| | | | | — | | — | | — | | |
| | | | | — | | — | | — | | |

[0564] TABLE 59

| | | | | mouse | | | | | |
|---|---|---|---|---|---|---|---|---|---|
| | | human | | | mouse | | mouse_Ref | mouse_Ref | mouse_Map |
| cat# | category | Probe ID | title | # | Probe ID | GenBank | Seq | SeqP | Location |
| 7 | enzyme | 75024_at | adenosine deaminase, RNA-specific | 1 | 102741_at | AW046250 | NM_019655 | NP_062629 | 3 |
| 7 | enzyme | 75024_at | adenosine deaminase, RNA-specific | 2 | 96188_at | AF052506 | NM_019655 | NP_062629 | 3 |
| 7 | enzyme | 79337_at | dual oxidase 2 | | none | | | | |
| 8 | hypothetical | 75423_at | Homo sapiens mRNA; cDNA | | none | | | | |
| | protein | | DKFZp564N1164 (from clone | | | | | | |
| | | | DKFZp564N1164) | | | | | | |
| 8 | hypothetical | 75857_at | Homo sapiens cDNA FLJ32334 fis, | | none | | | | |
| | protein | | clone PROST2005426 | | | | | | |
| 8 | hypothetical | 82008_at | Homo sapiens cDNA: FLJ21270 fis, | | none | | | | |
| | protein | | clone COL01749 | | | | | | |
| 8 | hypothetical | 91851_at | Homo sapiens cDNA FLJ12136 fis, | | none | | | | |
| | protein | | clone MAMMA1000312 | | | | | | |
| 9 | interferon- | 74908_at | interferon-induced protein 35 | | none | | | | |
| | inducible | | | | | | | | |
| | protein | | | | | | | | |
| 24 | signal | 89899_at | myxovirus (influenza) resistance 2. | 3 | 102699_at | J03368 | NM_013606 | NP_038634 | 16 71.2 cM |
| | transduction | | homolog of murine | | | | | | |
| 24 | signal | 89899_at | myxovirus (influenza) resistance 2. | 4 | 98417_at | M21038 | NM_010846 | NP_034976 | 16 71.2 cM |
| | transduction | | homolog of murine | | | | | | |
| | | 71157_at | ESTs, Weakly similar to T02670 | | none | | | | |
| | | | probable thromboxane A2 receptor | | | | | | |
| | | | isoform beta [H. sapiens] | | | | | | |
| | | 75000_at | Homo sapiens cDNA, 3′ end | | none | | | | |
| | | | /clone = IMAGE-2354811 | | | | | | |
| | | 80077_at | ESTs | | none | | | | |
| | | 80876_at | ESTs | | none | | | | |
| | | 81966_at | ESTs | | none | | | | |

| | mouse | | | MASM5 | | | | | | |
|---|---|---|---|---|---|---|---|---|---|---|
| | chip | homo- | | | 1 st | | 2nd | | 3 rd | |
| cat# | ID | logy | name | 1st | P/A | 2nd | P/A | 3rd | P/A | reference |
| 7 | A | 87.45% | adenosine deaminase, RNA-specific | 1.6 | A | 1.1 | A | 1.2 | A | Unpublished: - ( ) |
| | | | Curated Ortholog | | | | | | | |
| 7 | A | 87.45% | adenosine deaminase, RNA-specific | 1.9 | P | 1.2 | P | 1.4 | P | Unpublished: - ( ) |
| | | | Homolog | | | | | | | |
| 7 | | | | — | | — | | — | | |
| 8 | | | | — | | — | | — | | |
| 8 | | | | — | | — | | — | | |
| 8 | | | | — | | — | | — | | |
| 8 | | | | — | | — | | — | | |
| 9 | | | | | | | | | | |
| 24 | A | 89.60% | myxovirus (influenza virus) resistance | 1.2 | A | 0.9 | P | 1.3 | A | Mol. Cell Biol. 8: 4524- |
| | | | 1 Curated Ortholog | | | | | | | 4528 (1988) |
| 24 | A | 89.60% | myxovirus (influenza virus) resistance | 1.1 | A | 2.2 | A | 3 | A | Cell 44: 147-158 (1986) |
| | | | 1 Curated Ortholog | | | | | | | |
| | | | | — | | — | | — | | |
| | | | | — | | — | | — | | |
| | | | | — | | — | | — | | |
| | | | | — | | — | | — | | |
| | | | | — | | — | | — | | |

[0565] TABLE 60

| | | | | mouse | | | | | |
|---|---|---|---|---|---|---|---|---|---|
| cat | | human | | | mouse | | mouse_Ref | mouse_Ref | mouse_Map |
| # | category | Probe ID | title | # | Probe ID | GenBank | Seq | SeqP | Location |
| 2 | cell adhesion | 90421_at | epithelial stromal interaction 1 | 1 | 134663_at | AI592213 | — | — | |
| | | | (breast) | | | | | | |
| 2 | cell adhesion | 90421_at | epithelial stromal interaction 1 | 2 | 110160_at | AI510217 | — | — | |
| | | | (breast) | | | | | | |
| 4 | chemokine | 90189_at | small inducible cytokine subfamily A | | none | | | | |
| | | | (Cys—Cys), member 26 | | | | | | |
| 7 | enzyme | 72962_at | Branched chain aminotransferase 1, | | — | U42443 | NM_007532 | NP_031558 | 6 73.9 cM |
| | | | cytosolic | | | | | | |
| 7 | enzyme | 72960_s_at | Branched chain aminotransferase 1, | | — | U42443 | NM_007533 | NP_031558 | 6 73.9 cM |
| | | | cytosolic | | | | | | |
| 7 | enzyme | 77749_at | RNA helicase | | none | | | | |
| 7 | enzyme | 77751_at | glucosaminyl (N-acetyl) transferase | 3 | 132809_at | AA762195 | — | — | — |
| | | | 3, mucin type | | | | | | |
| 7 | enzyme | 90662_at | 2′-5′-oligoadenylate synthetase 2 | | none | | | | |
| | | | (69-71 kD) | | | | | | |
| 8 | hypothetical | 67329_at | hypothetical protein FLJ22833 | 4 | 92909_at | X80171 | NM_008827 | NP_032853 | 12 39.0 cM |
| | protein | | | | | | | | |
| 8 | hypothetical | 68562_at | Homo sapiens cDNA FLJ12136 fis, | | none | | | | |
| | protein | | clone MAMMA1000312 | | | | | | |
| 8 | hypothetical | 72867_at | Homo sapiens mRNA; cDNA | 5 | 102907_at | AW125043 | — | — | — |
| | protein | | DKFZp434G227 (from clone | | | | | | |
| | | | DKFZp434G227) | | | | | | |
| 8 | hypothetical | 80826_at | Homo sapiens cDNA FLJ25184 fis, | | none | | | | |
| | protein | | clone CBR09423 | | | | | | |
| 8 | hypothetical | 83376_at | hypothetical protein FLJ20281 | 6 | 110028_at | AW124261 | — | — | — |
| | protein | | | | | | | | |
| 8 | hypothetical | 83376_at | hypothetical protein FLJ20281 | 7 | 112808_at | AI853680 | — | — | — |
| | protein | | | | | | | | |
| 8 | hypothetical | 83541_at | KIAA1685 protein | 8 | 116098_at | AI646866 | — | — | — |
| | protein | | | | | | | | |
| 8 | hypothetical | 83541_at | KIAA1685 protein | 9 | 107796_at | AW261774 | — | — | — |
| | protein | | | | | | | | |

| | mouse | | | MASM5 | | | | | | |
|---|---|---|---|---|---|---|---|---|---|---|
| cat | chip | homo- | | | 1 st | | 2nd | | 3 rd | |
| # | ID | logy | name | 1st | P/A | 2nd | P/A | 3rd | P/A | reference |
| 2 | C | 90.23% | RIKEN cDNA 5033415K03 gene | 1.7 | A | 1.6 | A | 1 | A | — |
| | | | Putative Ortholog | | | | | | | |
| 2 | B | 90.23% | RIKEN cDNA 5033415K03 gene | 1.7 | P | 1.6 | P | 1.9 | P | — |
| | | | Putative Ortholog | | | | | | | |
| 4 | | | | — | | — | | — | | |
| 7 | — | 0.84 | Branched-chain amino acid | — | | — | | — | | Nucleic Acids Res. 18 (22). |
| | | | aminotransferase, cytosolic | | | | | | | 6709 (1990) |
| 7 | — | 0.84 | Branched-chain amino acid | — | | — | | — | | Nucleic Acids Res. 18 (22). |
| | | | aminotransferase, cytosolic | | | | | | | 6709 (1990) |
| 7 | | | | | | | | | | |
| 7 | C | 0.8883 | RIKEN CDNA 2010013H22 gene | 0.91 | A | 0.91 | A | 1 | A | — |
| | | | Homolog | | | | | | | |
| 7 | | | | — | | — | | — | | |
| 8 | — | — | placental growth factor Putative | 0.91 | A | 0.63 | A | 0.91 | P | Mamm. Genome 7: 6-12 |
| | | | Ortholog | | | | | | | (1996) |
| 8 | | | | — | | — | | — | | |
| 8 | A | 93.95% | expressed sequence AV2532B4 | 1 | P | 0.83 | P | 0.83 | P | — |
| | | | Putative Ortholog | | | | | | | |
| 8 | | | | — | | — | | — | | |
| 8 | B | 98.66% | expressed sequence AW212015 | 0.56 | A | 1.3 | A | 1.7 | A | — |
| | | | Putative Ortholog | | | | | | | |
| 8 | B | 98.66% | expressed sequence AW212015 | 1.1 | P | 0.56 | P | 0.91 | A | — |
| | | | Putative Ortholog | | | | | | | |
| 8 | B | 91.41% | ESTs, Highly similar to hypothetical | 1 | P | 1.3 | P | 0.91 | A | — |
| | | | protein FLJ10898 Putative Ortholog | | | | | | | |
| 8 | B | 91.41% | ESTs, Highly similar to hypothetical | 1.1 | P | 0.91 | P | 1 | P | — |
| | | | protein FLJ10898 Putative Ortholog | | | | | | | |

[0566] TABLE 61

| | | | | | | | | | |
|---|---|---|---|---|---|---|---|---|---|
| 8 | hypothetical | 89255_at | Homo sapiens cDNA FLJ11576 fis, | | none | | | | |
| | protein | | clone HEMBA1003548 | | | | | | |
| 8 | hypothetical | 89834_at | ESTs, Weakly similar to T22914 | 10 | 161376_f_at | AV243059 | NM_133349 | NP_579927 | 5 |
| | protein | | hypothetical protein F58E10.4 - | | | | | | |
| | | | Caenorhabditis elegans [C. elegans] | | | | | | |
| 8 | hypothetical | 89834_at | ESTs, Weakly similar to T22914 | 11 | 160713_at | AI841579 | NM_133349 | NP_579927 | 5 |
| | protein | | hypothetical protein F58E10.4 - | | | | | | |
| | | | Caenorhabditis elegans [C. elegans] | | | | | | |
| 8 | hypothetical | 89902_at | hypothetical protein FLJ21415 | 12 | 167609_r_at | AW121990 | — | — | — |
| | protein | | | | | | | | |
| 8 | hypothetical | 91420_at | hypothetical protein FLJ20989 | 13 | 94233_at | AW048642 | NM_054099 | NP_473440 | 15 D3 |
| | protein | | | | | | | | |

| | | | | | | | | | | |
|---|---|---|---|---|---|---|---|---|---|---|
| 8 | | | | — | | — | | — | | |
| 8 | A | 84.50% | expressed sequence AA407930 | 1.3 | A | 1.7 | A | 0.59 | A | Unpublished: - (2000) |
| | | | Putative Ortholog | | | | | | | |
| 8 | A | 84.50% | expressed sequence AA407930 | 0.71 | A | 0.83 | A | 1 | A | Unpublished: - (2000) |
| | | | Putative Ortholog | | | | | | | |
| 8 | C | 88.53% | RIKEN cDNA 2410131K14 gene | 0.59 | A | 0.67 | A | 1 | A | — |
| | | | Putative Ortholog | | | | | | | |
| 8 | A | 89.02% | RIKEN cDNA 1110038F14 gene | 0.71 | P | 1.1 | P | 0.83 | P | Meth. Enzymol. 303: 19-44 |
| | | | Putative Ortholog | | | | | | | (1999) |

| | | | | mouse | | | | | |
|---|---|---|---|---|---|---|---|---|---|
| cat | | human | | | mouse | | mouse_Ref | mouse_Ref | mouse_Map |
| # | category | Probe ID | title | # | Probe ID | GenBank | Seq | SeqP | Location |
| 9 | interferon- | 84893_at | vipirin | 14 | 109385_at | AI315194 | NM_021384 | NP_067S59 | 12 |
| | inducible | | | | | | | | |
| | protein | | | | | | | | |
| 12 | membrane | 77660_at | claudin 1 | 15 | 160415_at | AI604314 | NM_016674 | NP_057883 | 16 |
| | protein | | | | | | | | |
| 12 | membrane | 77660_at | claudin 1 | 16 | 97546_at | AF072127 | NM_016674 | NP_057883 | 16 |
| | protein | | | | | | | | |
| 12 | membrane | 86507_at | epiplakin 1 | | none | | | | |
| | protein | | | | | | | | |
| 16 | oncogenesis | 69619_at | B aggressive lymphoma gene | 17 | 109021_at | AW214142 | NM_030253 | NP_084529 | 16 B3 |
| 16 | oncogenesis | 87816_g_at | malignant fibrous histiocytoma | 18 | 163337_at | AA727483 | — | — | — |
| | | | amplified sequence 1 | | | | | | |
| 16 | oncogenesis | 89651_at | malignant fibrous histiocytoma | 18 | 163337_at | AA727483 | — | — | — |
| | | | amplified sequence 1 | | | | | | |
| 17 | others | 80675_at | ribosomal protein L4 | 19 | 162006_r_at | AV334115 | — | — | — |
| 17 | others | 80675_at | ribosomal protein L4 | 20 | 100589_at | AW047808 | — | — | — |
| 17 | others | 80675_at | ribosomal protein L4 | 21 | 133126_at | AW107849 | — | — | — |
| 17 | others | 85090_at | ets homologous factor | 22 | 102243_at | AF035527 | NM_007914 | NP_031940 | 2 |

| | mouse | | | MASM5 | | | | | | |
|---|---|---|---|---|---|---|---|---|---|---|
| cat | chip | homo- | | | 1 st | | 2nd | | 3 rd | |
| # | ID | logy | name | 1st | P/A | 2nd | P/A | 3rd | P/A | reference |
| 9 | B | 85.85% | viral hemorrhagic septicemia | 0.77 | P | 1.7 | P | 0.29 | A | J. Virol. 73: 1846-1852 (1999) |
| | | | virus(VHSV) induced gene 1 Putative | | | | | | | |
| | | | Ortholog | | | | | | | |
| 12 | A | 88.53% | claudin 1 Putative Ortholog (highly | 1.1 | A | 1.6 | P | 1.4 | P | J. Cell Biol. 141: 1539-1550 |
| | | | conserved) | | | | | | | (1998) |
| 12 | A | 88.53% | claudin 1 Putative Ortholog (highly | 1.1 | A | 0.53 | A | 1.2 | A | J. Cell Biol. 141: 1539-1550 |
| | | | conserved) | | | | | | | (1998) |
| 12 | | | | — | | — | | — | | |
| 16 | B | 85.82% | hypothetical protein, MGC: 7868 | 1.4 | P | 1.6 | P | 1.1 | P | Unpublished: - ( ) |
| | | | Putative Ortholog | | | | | | | |
| 16 | B | 92.68% | ESTs, Highly similar to MASL1 | 0.77 | P | 1.1 | P | 1.1 | P | — |
| | | | [H. sapiens] Putative Ortholog | | | | | | | |
| 16 | B | 92.68% | ESTs, Highly similar to MASL1 | 0.77 | P | 1.1 | P | 1.1 | P | — |
| | | | [H. sapiens] Putative Ortholog | | | | | | | |
| 17 | A | 92.23% | inner membrane protein, mitochondrial | 1.4 | P | 1.1 | P | 1 | P | — |
| | | | Putative Ortholog | | | | | | | |
| 17 | A | 92.23% | inner membrane protein, mitochondrial | 1.8 | A | 1.1 | A | 0.91 | A | — |
| | | | Putative Ortholog | | | | | | | |
| 17 | C | 92.23% | inner membrane protein, mitochondrial | 1.3 | A | 1.5 | A | 1.3 | A | — |
| | | | Putative Ortholog | | | | | | | |
| 17 | A | 92.69% | ets homologous factor Putative | 1.9 | A | 1.6 | A | 1.8 | A | Biochem. Biophys. Res. |
| | | | Ortholog (highly conserved) | | | | | | | Commun. 246: 176-181 (1998) |

[0567] TABLE 62

| | | | | | | | | | |
|---|---|---|---|---|---|---|---|---|---|
| 17 | others | 85090_at | ets homologous factor | 23 | 114753_at | AW215423 | NM_007914 | NP_031940 | 2 |
| 17 | others | 85090_at | ets homologous factor | 24 | 110963_at | AI527695 | NM_007914 | NP_031940 | 2 |
| 17 | others | 85092_g_at | ets homologous factor | 23 | 114753_at | AF035527 | NM_007914 | NP_031940 | 2 |
| 17 | others | 85092_g_at | ets homologous factor | 22 | 102243_at | AW215423 | NM_007914 | NP_031940 | 2 |
| 17 | others | 85092_g_at | ets homologous factor | 24 | 110963_at | AI527695 | NM_007914 | NP_031940 | 2 |
| 17 | others | 89320_at | MKI67 (FHA domain) interacting | 25 | 108958_at | AI851818 | — | — | — |
| | | | nucleolar phosphoprotein | | | | | | |
| 17 | others | 89320_at | MKI67 (FHA domain) interacting | 26 | 93342_at | AI852665 | — | — | — |
| | | | nucleolar phosphoprotein | | | | | | |
| 17 | others | 77546_at | odd Oz/ten-m homolog 2 | 27 | 92389_at | AB025411 | NM_011856 | NP_035986 | 11 18.0 cM |
| | | | (Drosophila, mouse) | | | | | | |
| 17 | others | 77546_at | odd Oz/ten-m homolog 2 | 28 | 133154_at | AW125558 | — | — | — |
| | | | (Drosophila, mouse) | | | | | | |

| | | | | | | | | | | |
|---|---|---|---|---|---|---|---|---|---|---|
| 17 | B | 92.68% | ets homologous factor Putative | 1.1 | P | 1.1 | A | 1.3 | P | Biochem. Biophys. Res. |
| | | | Ortholog (highly conserved) | | | | | | | Commun. 246: 176-181 (1998) |
| 17 | B | 92.68% | ets homologous factor Putative | 0.83 | A | 0.71 | A | 1 | A | Biochem. Biophys. Res. |
| | | | Ortholog (highly conserved) | | | | | | | Commun. 246: 176-181 (1998) |
| 17 | B | 92.68% | ets homologous factor Putative | 1.1 | P | 1.1 | A | 1.3 | P | Biochem. Biophys. Res. |
| | | | Ortholog (highly conserved) | | | | | | | Commun. 246: 176-181 (1998) |
| 17 | A | 92.68% | ets homologous factor Putative | 1.9 | A | 1.6 | A | 1.8 | A | Biochem. Biophys. Res. |
| | | | Ortholog (highly conserved) | | | | | | | Commun. 246: 176-181 (1998) |
| 17 | B | 92.68% | ets homologous factor Putative | 0.63 | A | 0.71 | A | 1.1 | A | Biochem. Biophys. Res. |
| | | | Ortholog (highly conserved) | | | | | | | Commun. 246: 176-181 (1998) |
| 17 | B | 93.20% | RIKEN cDNA C130020J04 gene | 0.83 | P | 1.1 | P | 1 | A | — |
| | | | Putative Ortholog (highly conserved) | | | | | | | |
| 17 | A | 93.20% | RIKEN cDNA C130020J04 gene | 1.3 | P | 0.83 | P | 1.1 | P | — |
| | | | Putative Ortholog (highly conserved) | | | | | | | |
| 17 | A | 89.61% | odd Oz/ten-m homolog 2 (Drosophila) | 1.5 | A | 0.56 | A | 0.46 | A | Unpublished (2001) |
| | | | Curated Ortholog | | | | | | | |
| 17 | C | 95.72% | ESTs Homolog | 0.67 | A | 0.48 | A | 1.4 | A | — |

| | | | | | mouse | | | | |
|---|---|---|---|---|---|---|---|---|---|
| cat | | human | | | mouse | | mouse_Ref | mouse_Ref | mouse_Map |
| # | category | Probe ID | title | # | Probe ID | GenBank | Seq | SeqP | Location |
| 20 | protein | 89338_at | Rab coupling protein | 29 | 135407_at | AW226597 | — | — | — |
| | binding | | | | | | | | |
| | protein | | | | | | | | |
| 24 | signal | 87125_at | nuclear receptor co- | | — | AF268195 | NM_030732 | NP_109657 | — |
| | transduction | | repressor/HDAC3 complex subunit | | | | | | |
| 27 | transporter | 87860_s_at | solute carrier family 21 (organic | | none | | | | |
| | | | anion transporter), member 12 | | | | | | |
| 27 | transporter | 88617_at | solute carrier family 17 (anion/sugar | | none | | | | |
| | | | transporter), member 5 | | | | | | |
| | | 67357_at | ESTs | | none | | | | |

| | mouse | | | MASM5 | | | | | | |
|---|---|---|---|---|---|---|---|---|---|---|
| cat | chip | homo- | | MAS | 1 st | | 2nd | | 3rd | |
| # | ID | logy | name | M5 | P/A | 2nd | P/A | 3rd | P/A | reference |
| 20 | C | 93.75% | RIKEN cDNA 4833414G05 gene | 0.77 | A | 2.5 | A | 2.1 | A | — |
| | | | Putative Ortholog | | | | | | | |
| 24 | — | | IRA1 protein (IRA1) | — | | — | | — | | Unpublished |
| 27 | | | | — | | — | | — | | |
| 27 | | | | — | | — | | — | | |
| | | | | — | | — | | — | | |

[0568] TABLE 63

| | | | | mouse | | | | | |
|---|---|---|---|---|---|---|---|---|---|
| | | human | | | mouse | | mouse_Ref | mouse_Ref | mouse_Map |
| cat# | category | Probe ID | title | # | Probe ID | GenBank | Sen | SeqP | Location |
| 1 | apoptosis | 33412_at | beta-galactosidase binding lectin | 1 | 99669_at | X15986 | NM_008495 | NP_032521 | 15 44.9 cM |
| | | | precursor | | | | | | |
| 2 | cell adhesion | 33693_at | desmoglein 3 preproprotein | | none | | | | |
| 2 | cell adhesion | 34193_at | cell adhesion molecule with | 2 | 161239_r_at | AV281386 | NM_007697 | NP_031723 | — |
| | | | homology to L1CAM (close | | | | | | |
| | | | homologue of L1) | | | | | | |
| 2 | cell adhesion | 34193_at | cell adhesion molecule with | 3 | 103068_at | X94310 | NM_007697 | NP_031723 | — |
| | | | homology to L1CAM (close | | | | | | |
| | | | homologue of L1) | | | | | | |
| 2 | cell adhesion | 34193_at | cell adhesion molecule with | 4 | 167319_i_at | AV283855 | NM_007697 | NP_031723 | — |
| | | | homology to L1CAM (close | | | | | | |
| | | | homologue of L1) | | | | | | |
| 2 | cell adhesion | 34193_at | cell adhesion molecule with | 5 | 169984_i_at | AV278112 | NM_007697 | NP_031723 | — |
| | | | homology to L1CAM (close | | | | | | |
| | | | homologue of L1) | | | | | | |
| 2 | call adhesion | 36284_at | lymphocyte antigen 6 | | — | A46528 | — | — | — |
| | | | complex, locus D | | | | | | |
| 2 | cell adhesion | 38112_g_at | chondroitin sulfate proteo- | 6 | 100019_at | D45889 | NM_019389 | NP_062262 | 13 55.0 Cm |
| | | | glycan 2 (versican) | | | | | | |
| 2 | cell adhesion | 38127_at | syndecan 1 | 7 | 161370_f_at | AV239731 | NM_011519 | NP_035649 | 12 1.0 cM |
| 2 | cell adhesion | 38127_at | syndecan 1 | 8 | 96033_at | Z22532 | NM_011519 | NP_035649 | 12 1.0 cM |
| 2 | cell adhesion | 39579_at | claudin 10 | 9 | 165372_at | AV056802 | — | — | — |
| 4 | chemokine | 823_at | small inducible cytokine | 10 | 164885_fat | AV335220 | NM_009142 | NP_033168 | 8 46.0 cM |
| | | | subfamily D (Cys-X3-Cys), | | | | | | |
| | | | member 1 (fractalkine, | | | | | | |
| | | | neurotactin) | | | | | | |
| 4 | chemokine | 823_at | small inducible cytokine | 11 | 98008_at | U92565 | NM_009142 | NP_033168 | 8 46.0 cM |
| | | | subfamily D (Cys-X3-Cys), | | | | | | |
| | | | member 1 (fractalkine, | | | | | | |
| | | | neurotactin) | | | | | | |
| 4 | chemokine | 823_at | small inducible cytokine | 12 | 161752_r_at | AV290053 | NM_009142 | NP_033168 | 8 46.0 cM |
| | | | subfamily D (Cys-X3-Cys), | | | | | | |
| | | | member 1 (fractalkine, | | | | | | |
| | | | neurotactin) | | | | | | |

| | mouse | | | MASM5 | | | | | | |
|---|---|---|---|---|---|---|---|---|---|---|
| | chip | homo- | | | 1 st | | 2nd | | 3 rd | |
| cat# | ID | logy | name | 1st | P/A | 2nd | P/A | 3rd | P/A | reference |
| 1 | A | | lectin, galactose binding, soluble 1 | 1.6 | P | 2 | P | 1.3 | P | Cancer Res. 48: 645-649 (1988) |
| | | | Curated Ortholog | | | | | | | |
| 2 | | | | — | | — | | — | | |
| 2 | A | | close homolog of L1 Curated | 1.3 | A | 1.1 | A | 0.7 | A | Unpublished: - ( ) |
| | | | Ortholog | | | | | | | |
| 2 | A | | close homolog of L1 Curated | 0.7 | A | 0.67 | A | 1.1 | A | Unpublished: - ( ) |
| | | | Ortholog | | | | | | | |
| 2 | C | | close homolog of L1 Curated | 1.1 | A | 1.3 | A | 1.2 | A | Unpublished: - ( ) |
| | | | Ortholog | | | | | | | |
| 2 | C | | close homolog of L1 Curated | 1 | A | 0.91 | A | 0.9 | A | Unpublished: - ( ) |
| | | | Ortholog | | | | | | | |
| 2 | — | 60.00% | lymphocyte antigen 6 complex, locus | — | | — | | — | | Biochemistry 1994 Apr |
| | | | D | | | | | | | 19: 33(15): 4471-82 |
| 2 | A | | chondroitin sulfate proteoglycan 2 | 5.4 | A | 2.3 | A | 5 | A | J. Biol. Chem. 270: 958-965 |
| | | | Curated Ortholog | | | | | | | (1995) |
| 2 | A | 90.77% | syndecan 1 Putative Ortholog (highly | 0.4 | A | 0.36 | A | 1 | A | J. Cell Biol. 108: 1547-1556 |
| | | | conserved) | | | | | | | (1989) |
| 2 | A | 90.77% | syndecan 1 Putative Ortholog (highly | 1.5 | P | 0.56 | A | 0.5 | P | J. Cell Biol. 108: 1547-1556 |
| | | | conserved) | | | | | | | (1989) |
| 2 | B | 89.43% | RIKEN cDNA 6720456I16 gene | 1.4 | P | 1.8 | A | 1.9 | A | — |
| | | | Putative Ortholog | | | | | | | |
| 4 | B | 83.77% | small inducible cytokine subfamily D, 1 | 1 | P | 0.56 | M | 1.1 | P | Nature 387: 611-617 (1997) |
| 4 | A | 83.77% | small inducible cytokine subfamily D, | 1.3 | P | 1.4 | A | 1.4 | P | Nature 387: 611-617 (1997) |
| | | | 1 Putative Ortholog (highly | | | | | | | |
| | | | conserved) | | | | | | | |
| 4 | A | 83.77% | small inducible cytokine subfamily D, | 2.3 | A | 0.29 | A | 1.6 | A | Nature 387: 611-617 (1997) |
| | | | 1 Putative Ortholog (highly | | | | | | | |
| | | | conserved) | | | | | | | |

[0569] TABLE 64

| | | | | | | | | | |
|---|---|---|---|---|---|---|---|---|---|
| 5 | cytokine | 1385_at | transforming growth | 13 | 161157_r_at | AV231282 | NM_009369 | NP_033395 | 13 38.0 cM |
| | related | | factor, beta- | | | | | | |
| | | | induced, 68 kD | | | | | | |
| 5 | cytokine | 1385_at | transforming growth | 14 | 92877_at | L19932 | NM_009369 | NP_033395 | 13 38.0 cM |
| | related | | factor, beta- | | | | | | |
| | | | induced, 68 kD | | | | | | |
| 5 | cytokine | 38631_at | tumor necrosis factor, | 15 | 160489_at | L24118 | NM_009369 | NP_033395 | 13 38.0 cM |
| | related | | alpha-induced | | | | | | |
| | | | protein 2 | | | | | | |

| | | | | | | | | | | |
|---|---|---|---|---|---|---|---|---|---|---|
| 5 | A | 88.65% | transforming growth | 1.6 | A | 1.9 | A | 0.4 | A | DNA Cell Biol. 13: 571- |
| | | | factor, beta induced, | | | | | | | 584(1994) |
| | | | 68 kDa Homolog | | | | | | | |
| 5 | A | 88.65% | transforming growth | 1.3 | P | 1.8 | P | 0.9 | P | DNA Cell Biol. 13: 571- |
| | | | factor, beta induced, | | | | | | | 584(1994) |
| | | | 68 kDa Homolog | | | | | | | |
| 5 | A | 83.17% | tumor necrosis factor, | 0.6 | A | 0.67 | A | 0.6 | A | DNA Cell Biol. 13: 571- |
| | | | alpha-induced protein | | | | | | | 584(1994) |
| | | | 2 Putative Ortholog | | | | | | | |

| | | | | mouse | | | | | |
|---|---|---|---|---|---|---|---|---|---|
| | | human | | | mouse | | mouse_Ref | mouse_Ref | mouse_Map |
| cat# | category | Probe ID | title | # | Probe ID | GenBank | Seq | SeqP | Location |
| 6 | cytosolic | 35275_at | adaptor-related protein | 16 | 161593_r_at | AV291690 | — | — | — |
| | protein | | complex 1, gamma 1 | | | | | | |
| | | | subunit | | | | | | |
| 6 | cytosolic | 35275_at | adaptor-related protein | 17 | 103242_at | AW123834 | NM_009677 | NP_033807 | — |
| | protein | | complex 1, gamma 1 | | | | | | |
| | | | subunit | | | | | | |
| 6 | cytosolic | 35275_at | adaptor-related protein | 18 | 92288_at | X54424 | NM_009677 | NP_033807 | — |
| | protein | | complex 1, gamma 1 | | | | | | |
| | | | subunit | | | | | | |
| 6 | cytosolic | 40508_at | glutathione S- | | none | | | | |
| | protein | | transferase A4 | | | | | | |
| 7 | enzyme | 32805_at | hepatic dihydrodiol | | none | | | | |
| | | | dehydrogenase gene, | | | | | | |
| | | | exon 9 | | | | | | |
| 7 | enzyme | 34637_f_at | class 1 alcohol | 19 | 94906_at | M22679 | NM_007409 | NP_031435 | 3 71.2 cM |
| | | | dehydrogenase, alpha | | | | | | |
| | | | subunit | | | | | | |
| 7 | enzyme | 34935_at | dJ127D3.3 (Flavin- | 20 | 106011_at | AW261476 | NM_018881 | NP_061369 | — |
| | | | containing | | | | | | |
| | | | Monooxygenase 2) | | | | | | |
| 7 | enzyme | 35947_at | keratinocyte | 21 | 165790_at | AA681923 | NM_019984 | NP_064368 | — |
| | | | transglutaminase gene | | | | | | |
| 7 | enzyme | 36247_f_at | class 1 alcohol | 19 | 94906_at | M22679 | NM_007409 | NP_031435 | 3 71.2 cM |
| | | | dehydrogenase, | | | | | | |
| | | | gamma subunit | | | | | | |
| 7 | enzyme | 36454_at | carbonic anhydrase | 22 | 103905_at | AI314958 | — | — | — |
| | | | XII precursor | | | | | | |
| 7 | enzyme | 36658_at | seladin-1 | | none | | | | |
| 7 | enzyme | 37215_at | glycogen phosphorylase | 23 | 164478_r_at | AV246818 | NM_133198 | NP_573461 | 12 30.0 cM |
| 7 | enzyme | 37215_at | glycogen phosphorylase | 24 | 110291_at | AI256150 | NM_133198 | NP_573461 | 12 30.0 cM |
| 7 | enzyme | 37415_at | ATPase, Class V, | | none | | | | |
| | | | type 10B | | | | | | |
| 7 | enzyme | 37700_at | bleomycin hydrolase | 25 | 162221_i_at | AV112892 | — | — | — |
| 7 | enzyme | 37700_at | bleomycin hydrolase | 26 | 94842_at | AI853630 | — | — | — |

| | |
|---|---|
| mouse | MASM5 |

| | chip | homo- | | | 1 st | | 2nd | | 3 rd | |
|---|---|---|---|---|---|---|---|---|---|---|
| cat# | ID | logy | name | 1st | P/A | 2nd | P/A | 3rd | P/A | reference |
| 6 | A | 93.61% | adaptor protein complex | 0.6 | A | 0.22 | A | 0.7 | A | — |
| | | | AP-1, gamma 1 subunit | | | | | | | |
| | | | Putative Ortholog (highly | | | | | | | |
| | | | conserved) | | | | | | | |
| 6 | A | 93.61% | adaptor protein complex | 1.1 | P | 1.2 | P | 0.8 | P | J. Cell Biol. 111: 2319- |
| | | | AP-1, gamma 1 subunit | | | | | | | 2326 (1990) |
| | | | Putative Ortholog (highly | | | | | | | |
| | | | conserved) | | | | | | | |
| 6 | A | 93.61% | adaptor protein complex | 1 | P | 0.83 | A | 1.2 | P | J. Cell Biol. 111: 2319- |
| | | | AP-1, gamma 1 subunit | | | | | | | 2326 (1990) |
| | | | Putative Ortholog (highly | | | | | | | |
| | | | conserved) | | | | | | | |
| 6 | | | | — | | — | | — | | |
| 7 | | | | — | | — | | — | | |
| 7 | A | | alcohol dehydrogenase 1, | 0.6 | P | 0.29 | P | 0.5 | P | Proc. Natl. Acad. Sci. |
| | | | complex Curated Ortholog | | | | | | | U.S.A. 82: 2262-2266 (1985) |
| 7 | B | 86.79% | flavin containing | 0.7 | P | 0.53 | P | 0.9 | P | Genome Res. 10: 1617-1630 |
| | | | monooxygenase 2 Curated | | | | | | | (2000) |
| | | | Ortholog | | | | | | | |
| 7 | C | | transglutaminase 1, K | 1.2 | A | 0.46 | A | 1 | A | J. Biol. Chem. 274: 34148- |
| | | | polypeptide Curated | | | | | | | 34154 (1999) |
| | | | Ortholog | | | | | | | |
| 7 | A | 84.57% | alcohol dehydrogenase 1, | 0.6 | P | 0.29 | P | 0.5 | P | Proc. Natl. Acad. Sci. U.S.A. |
| | | | complex Putative Ortholog | | | | | | | 82: 2262-2266 (1985) |
| 7 | A | 94.05% | RIKEN cDNA 2310047E01 gene | 0.6 | A | 0.59 | A | 1 | A | — |
| | | | Putative Ortholog | | | | | | | |
| 7 | | | | — | | — | | — | | |
| 7 | B | | liver glycogen phosphorylase | 1.1 | A | 1.6 | A | 1.3 | A | Unpublished: - (2001) |
| | | | Curated Ortholog | | | | | | | |
| 7 | B | | liver glycogen phosphorylase | 0.9 | P | 1.3 | P | 1.2 | P | Unpublished: - (2001) |
| | | | Curated Ortholog | | | | | | | |
| 7 | | | | — | | — | | — | | |
| 7 | A | 91.80% | clone MGC: 37104 IMAGE: | 1.1 | M | 1.3 | A | 1 | A | — |
| | | | 4952098, mRNA, complete cds | | | | | | | |
| | | | Putative Ortholog | | | | | | | |
| 7 | A | 91.80% | clone MGC: 37104 IMAGE: | 0.8 | P | 0.909 | P | 1.2 | P | — |
| | | | 4952098, mRNA, complete cds | | | | | | | |
| | | | Putative Ortholog | | | | | | | |

[0570] TABLE 65

| | | | | | | | | | |
|---|---|---|---|---|---|---|---|---|---|
| 7 | enzyme | 37700_at | blaomycin hydrolase | 27 | 162179_r_at | AV367224 | — | — | — |
| 7 | enzyme | 37956_at | aldehyde dehydrogenase 3B2 | | none | | | | |
| 7 | enzyme | 38285_at | crystallin, mu | 28 | 160937_at | AF039391 | NM_016669 | NP_057878 | 7 55.0 cM |
| 7 | enzyme | 38285_at | crystallin, mu | 29 | 166000_at | AV248813 | NM_016669 | NP_057878 | 7 55.0 cM |
| 7 | enzyme | 38790_at | epoxide hydrolase 1, | 30 | 101587_at | U89419 | NM_010145 | NP_034275 | 1 98.5 cM |
| | | | microsomal (xenobiotic) | | | | | | |
| 7 | enzyme | 39008_at | ceruloplasmin (ferroxidase) | 31 | 92851_at | U49430 | NM_007752 | NP_031778 | 9 55.0 cM |
| 7 | enzyme | 39317_at | cytidine monophospho-N- | 32 | 93688_at | D21826 | NM_007717 | NP_031743 | — |
| | | | acetylneuraminic acid | | | | | | |
| | | | hydroxylase | | | | | | |
| 7 | enzyme | 40082_at | long-chain fatty-acid- | 33 | 94507_at | U15977 | NM_007981 | NP_032007 | — |
| | | | Coenzyme A ligase 2 | | | | | | |
| 7 | enzyme | 40522_at | glutamate-ammonia ligase | 34 | 117284_at | AI848384 | NM_008131 | NP_032157 | — |
| | | | (glutamine synthase) | | | | | | |
| 7 | enzyme | 40522_at | glutamate-ammonia ligase | 35 | 99498_at | M60803 | NM_008131 | NP_032157 | — |
| | | | (glutamine synthase) | | | | | | |
| 7 | enzyme | 40522_at | glutamate-ammonia ligase | 36 | 94852_at | U09114 | NM_008131 | NP_032157 | — |
| | | | (glutamine synthase) | | | | | | |
| 7 | enzyme | 40522_at | glutamate-ammonia ligase | 37 | 161826_r_at | AV381947 | NM_008131 | NP_032157 | — |
| | | | (glutamine synthase) | | | | | | |
| 7 | enzyme | 40665_at | flavin containing | 38 | 101991_at | D16215 | NM_010231 | NP_034361 | — |
| | | | monooxygenase 3 | | | | | | |
| 7 | enzyme | 40665_at | flavin containing | 39 | 104421_at | U87147 | NM_008030 | NP_032056 | — |
| | | | monooxygenase 3 | | | | | | |
| 7 | enzyme | 770_at | plasma glutathione | 40 | 168706_r_at | AV225591 | NM_008161 | NP_032187 | — |
| | | | peroxidase 3 precursor | | | | | | |
| 7 | enzyme | 770_at | plasma glutathione | 41 | 101676_at | U13705 | NM_008161 | NP_032187 | — |
| | | | peroxidase 3 precursor | | | | | | |

| | | | | | | | | | | |
|---|---|---|---|---|---|---|---|---|---|---|
| 7 | A | 91.80% | clone MGC: 37104 IMAGE: | 1.1 | A | 1.2 | A | 1.4 | A | — |
| | | | 4952098, mRNA, complete | | | | | | | |
| | | | cds Putative Ortholog | | | | | | | |
| 7 | | | | — | | — | | — | | |
| 7 | A | | crystallin, mu Curated | 1.9 | A | 0.91 | A | 0.6 | A | Unpublished: - ( ) |
| | | | Ortholog | | | | | | | |
| 7 | C | | crystallin, mu Curated | 1.3 | A | 0.59 | A | 0.4 | A | Unpublished: - ( ) |
| | | | Ortholog | | | | | | | |
| 7 | A | | epoxide hydrolase 1, | 0.5 | P | 0.04 | A | 0.4 | P | Genome Res. 10: 1617-1630 |
| | | | microsomal Curated Ortholog | | | | | | | (2000) |
| 7 | A | | ceruloplasmin Curated | 1.6 | P | 3.1 | P | 2.2 | P | J. Clin. Invest. 98: 207-215 |
| | | | Ortholog | | | | | | | (1996) |
| 7 | A | | cytidine monophospho-N- | 0.2 | A | 2.5 | A | 1.9 | A | J. Biol. Chem. 270: 16458- |
| | | | acetylneuraminic acid | | | | | | | 16463 (1995) |
| | | | hydroxylase Curated | | | | | | | |
| | | | Ortholog | | | | | | | |
| 7 | A | | fatty acid Coenzyme A | 0.6 | P | 0.83 | P | 1 | P | Genome Res. 10: 1617-1630 |
| | | | ligase, long chain 2 | | | | | | | (2000) |
| | | | Curated Ortholog | | | | | | | |
| 7 | B | 89.74% | glutamine synthetase | 0.8 | P | 0.63 | P | 1.9 | P | J. Mol. Biol. 208: 45-56 (1989) |
| | | | Curated Ortholog | | | | | | | |
| 7 | A | 89.74% | glutamine synthetase | 0.4 | A | 0.77 | A | 1.3 | A | J. Mol. Biol. 208: 45-56 (1989) |
| | | | pseudogene 1 Homolog | | | | | | | |
| 7 | A | 89.74% | glutamine synthetase | 0.9 | P | 0.77 | P | 1 | P | J. Mol. Biol. 208: 45-56 (1989) |
| | | | Homolog | | | | | | | |
| 7 | A | 89.74% | glutamine synthetase | 1.2 | P | 0.91 | P | 1.2 | P | J. Mol. Biol. 208: 45-56 (1989) |
| | | | Homolog | | | | | | | |
| 7 | A | 85.71% | flavin containing | 1.1 | P | 0.71 | P | 0.6 | P | Unpublished: - ( ) |
| | | | monooxygenase 1 Homolog | | | | | | | |
| 7 | A | | flavin containing | 0.4 | P | 0.27 | P | 0.4 | P | Arch. Biochem. Biophys. 347: |
| | | | monooxygenase 3 Curated | | | | | | | 9-18 (1997) |
| | | | Ortholog | | | | | | | |
| 7 | C | | glutathione peroxidase 3 | 0.2 | A | 1.1 | A | 3.2 | A | J. Biol. Chem. 269: 27066- |
| | | | Curated Ortholog | | | | | | | 27073 (1994) |
| 7 | A | | glutathione peroxidase 3 | 0.9 | P | 0.91 | P | 0.9 | P | J. Biol. Chem. 269: 27066- |
| | | | Curated Ortholog | | | | | | | 27073 (1994) |

| | | | | mouse | | | | | |
|---|---|---|---|---|---|---|---|---|---|
| | | human | | | mouse | | mouse_Ref | mouse_Ref | mouse_Map |
| cat# | category | Probe ID | title | # | Probe ID | GenBank | Seq | SeqP | Location |
| 8 | hypothetical | 32215_i_at | KIAA0878 protein | 42 | 113969_at | AW208826 | — | — | — |
| | protein | | | | | | | | |
| 8 | hypothetical | 39400_at | KIAA1055 protein | | none | | | | |
| | protein | | | | | | | | |
| 8 | hypothetical | 39597_at | KIAA0843 protein | 43 | 135495_r_at | AV242700 | — | — | — |
| | protein | | | | | | | | |
| 8 | hypothetical | 39597_at | KIAA0843 protein | 44 | 162919_at | AI227478 | — | — | — |
| | protein | | | | | | | | |
| 8 | hypothetical | 39597_at | KIAA0843 protein | 45 | 112372_at | AW230421 | — | — | — |
| | protein | | | | | | | | |

| | mouse | | | MASM5 | | | | | | |
|---|---|---|---|---|---|---|---|---|---|---|
| | chip | homo- | | | 1 st | | 2nd | | 3 rd | |
| cat# | ID | logy | name | 1st | P/A | 2nd | P/A | 3rd | P/A | reference |
| 8 | B | 94.02% | RIKEN cDNA 2610033K01 gene | 0.7 | P | 0.83 | A | 0.8 | P | — |
| | | | Putative Ortholog | | | | | | | |
| 8 | | | | — | | — | | — | | |
| 8 | C | 96.00% | ESTs, Weakly similar to | 0.9 | A | 0.83 | A | 1.3 | P | — |
| | | | A28490 DNA-directed RNA | | | | | | | |
| | | | polymerase [M. musculus] | | | | | | | |
| | | | Putative Ortholog | | | | | | | |
| 8 | B | 96.00% | ESTs, Weakly similar to | 0.9 | P | 0.67 | P | 0.4 | A | — |
| | | | A28490 DNA-directed RNA | | | | | | | |
| | | | polymerase [M. musculus] | | | | | | | |
| | | | Putative Ortholog | | | | | | | |
| 8 | B | 96.00% | ESTs, Weakly similar to | 0.7 | P | 0.56 | P | 0.6 | P | — |
| | | | A28490 DNA-directed RNA | | | | | | | |
| | | | polymerese [M. musculus] | | | | | | | |
| | | | Putative Ortholog | | | | | | | |

[0571] TABLE 66

| | | | | | | | | | |
|---|---|---|---|---|---|---|---|---|---|
| 8 | hypothetical | 40943_at | long-chain fatty- | 46 | 108490_at | AI463227 | — | — | — |
| | protein | | acyl elongase | | | | | | |
| 8 | hypothetical | 40943_at | long-chain fatty- | 47 | 94418_at | AI839004 | NM_130450 | NP_569717 | — |
| | protein | | acyl elongase | | | | | | |

| | | | | | | | | | | |
|---|---|---|---|---|---|---|---|---|---|---|
| 8 | B | 99.19% | long chain fatty acyl | 1 | P | 1.1 | P | 1 | P | — |
| | | | elongase Putative | | | | | | | |
| | | | Ortholog | | | | | | | |
| 8 | A | 99.19% | long chain fatty acyl | 0.4 | A | 1.7 | P | 1.7 | P | Unpublished: - (2001) |
| | | | elongase Putative | | | | | | | |
| | | | Ortholog | | | | | | | |

| | | | | mouse | | | | | |
|---|---|---|---|---|---|---|---|---|---|
| | | human | | | mouse | | mouse_Ref | mouse_Ref | mouse_Map |
| cat# | category | Probe ID | title | # | Probe ID | GenBank | Seq | SeqP | Location |
| 10 | kinase | 1108_s_at | EphA1 | 48 | 169261_at | AV298003 | NM_023580 | NP_076069 | — |
| 10 | kinase | 1108_s_at | EphA1 | 49 | 100143_at | Y07711 | NM_011777 | NP_035907 | — |
| 10 | kinase | 33804_at | protein tyrosine | 50 | 103451_at | AI835159 | — | — | — |
| | | | kinase 2 beta | | | | | | |
| 10 | kinase | 33804_at | protein tyrosine | 51 | 169902_at | AV214820 | — | — | — |
| | | | kinase 2 beta | | | | | | |
| 10 | kinase | 33804_at | protein tyrosine | 52 | 167168_f_at | AV127592 | — | — | — |
| | | | kinase 2 beta | | | | | | |
| 10 | kinase | 33804_at | protein tyrosine | 53 | 160067_at | AW125329 | — | — | — |
| | | | kinase 2 beta | | | | | | |
| 10 | kinase | 36502_at | PFTAIRE protein | 54 | 93422_at | U62391 | NM_011074 | NP_035204 | 5 0.0 cM |
| | | | kinase 1 | | | | | | |
| 10 | kinase | 36502_at | PFTAIRE protein | 55 | 93421_at | AF033655 | NM_011074 | NP_035204 | 5 0.0 cM |
| | | | kinase 1 | | | | | | |
| 10 | kinase | 36502_at | PFTAIRE protein | 56 | 168913_r_at | AV347594 | NM_011074 | NP_035204 | 5 0.0 cM |
| | | | kinase 1 | | | | | | |
| 10 | kinase | 36502_at | PFTAIRE protein | 57 | 167725_f_at | AI847882 | NM_011074 | NP_035204 | 5 0.0 cM |
| | | | kinase 1 | | | | | | |
| 10 | kinase | 39120_at | metallothionein 1L | 58 | 113152_at | AI850672 | NM_016866 | NP_058562 | — |
| 10 | kinase | 39120_at | metallothionein 1L | 59 | 160806_at | AF099988 | NM_016866 | NP_058562 | — |
| 11 | matrix | 36881_at | electron-transfer- | 60 | 96947_at | AW046273 | — | — | — |
| | protein | | flavoprotein, beta | | | | | | |
| | | | polypeptide | | | | | | |
| 11 | matrix | 36881_at | electron-transfer- | 61 | 162144_at | AV351508 | — | — | — |
| | protein | | flavoprotein, beta | | | | | | |
| | | | polypeptide | | | | | | |
| 11 | matrix | 36881_at | electron-transfer- | 62 | 107600_at | AI838753 | — | — | — |
| | protein | | flavoprotein. beta | | | | | | |
| | | | polypeptide | | | | | | |
| 11 | matrix | 37600_at | extracellular matrix | 63 | 98054_at | L33416 | NM_007899 | NP_031925 | 3 45.4 cM |
| | protein | | protein 1, isoform 1, | | | | | | |
| | | | 2 | | | | | | |
| 11 | matrix | 37600_at | extracellular matrix | 64 | 170917_r_at | AV092620 | NM_007899 | NP_031925 | 3 45.4 cM |
| | protein | | protein 1, isoform 1, | | | | | | |
| | | | 2 | | | | | | |
| 11 | matrix | 37600_at | extracellular matrix | 65 | 160641_at | AI021573 | NM_133232 | NP_573495 | — |
| | protein | | protein 1, isoform 1, | | | | | | |
| | | | 2 | | | | | | |

| | mouse | | | MASM5 | | | | | | |
|---|---|---|---|---|---|---|---|---|---|---|
| | chip | homo- | | | 1 st | | 2nd | | 3 rd | |
| cat# | ID | logy | name | 1st | P/A | 2nd | P/A | 3rd | P/A | reference |
| 10 | C | 92.55% | Eph receptor A1 | 0.9 | M | 0.91 | A | 0.7 | A | Proc. Natl. Acad. Sci. |
| | | | Curated Ortholog | | | | | | | U.S.A. 93: 145-150 (1996) |
| 10 | A | 92.55% | zyxin Putative Ortholog | 3.3 | A | 1.5 | A | 0.8 | A | J. Biol. Chem. 271: 31470- |
| | | | | | | | | | | 31478 (1996) |
| 10 | A | | protein tyrosine kinase | 1.3 | P | 1.2 | P | 1.1 | P | — |
| | | | 2 beta Curated Ortholog | | | | | | | |
| 10 | C | 93.42% | RIKEN cDNA 2310057D15 | 1.3 | A | 1.6 | A | 1.6 | A | — |
| | | | gene Putative Ortholog | | | | | | | |
| 10 | C | 93.42% | RIKEN cDNA 2310057D15 | 1 | P | 1.2 | P | 0.9 | P | — |
| | | | gene Putative Ortholog | | | | | | | |
| 10 | A | 93.42% | RIKEN cDNA 2310057015 | 1 | A | 1.6 | A | 1 | A | — |
| | | | gene Putative Ortholog | | | | | | | |
| 10 | A | 94.21% | PFTAIRE protein kinase 1 | 1.5 | P | 0.71 | A | 1.3 | P | J. Neurochem. 69: 348-364 |
| | | | Putative Ortholog (highly | | | | | | | (1997) |
| | | | conserved) | | | | | | | |
| 10 | A | 94.21% | PFTAIRE protein kinase 1 | 0.8 | P | 0.71 | P | 0.6 | P | J. Neurochem. 69: 348-364 |
| | | | Putative Ortholog (highly | | | | | | | (1997) |
| | | | conserved) | | | | | | | |
| 10 | C | 94.21% | PFTAIRE protein kinase 1 | 0.8 | A | 0.77 | A | 0.7 | A | J. Neurochem. 69: 348-364 |
| | | | Putative Ortholog | | | | | | | (1997) |
| 10 | C | 94.21% | PFTAIRE protein kinase 1 | 0.8 | P | 0.83 | P | 0.7 | P | J. Neurochem. 69: 348-364 |
| | | | Putative Ortholog | | | | | | | (1997) |
| 10 | B | 93.22% | serine/threonine kinase 39, | 1 | P | 0.32 | A | 1 | A | Oncogene 19: 4290-4297 |
| | | | STE20/SPS1 homolog (yeast) | | | | | | | (2000) |
| | | | Putative Ortholog (highly | | | | | | | |
| | | | conserved) | | | | | | | |
| 10 | A | 93.22% | serine/threonine kinase 39, | 1.6 | P | 0.56 | A | 0.9 | P | Oncogene 19: 4290-4297 |
| | | | STE20/SPS1 homolog (yeast) | | | | | | | (2000) |
| | | | Putative Ortholog (highly | | | | | | | |
| | | | conserved) | | | | | | | |
| 11 | A | 87.45% | RIKEN cDNA 0610009116 gene | 0.9 | P | 1.1 | P | 1.1 | P | — |
| | | | Putative Ortholog (highly | | | | | | | |
| | | | conserved) | | | | | | | |
| 11 | A | 87.45% | RIKEN cDNA 0610009116 gene | 1.6 | P | 1 | P | 0.8 | M | — |
| | | | Putative Ortholog (highly | | | | | | | |
| | | | conserved) | | | | | | | |
| 11 | B | | RIKEN cDNA 4921504116 gene | 0.8 | P | 0.77 | P | 0.9 | P | — |
| | | | Curated Ortholog | | | | | | | |
| 11 | A | 86.72% | extracellular matrix | 0.9 | A | 1.3 | A | 1.5 | A | Gene 226: 253-261 (1999) |
| | | | protein 1 Homolog | | | | | | | |
| 11 | C | 86.72% | extracellular matrix | 0.3 | A | 1.4 | A | 2.3 | A | Gene 226: 253-261 (1999) |
| | | | protein 1 Homolog | | | | | | | |
| 11 | A | 93.10% | inducible 6-phosphofructo- | 0.9 | A | 0.83 | P | 0.6 | A | Unpublished: - ( ) |
| | | | 2-kinase Putative Ortholog | | | | | | | |

[0572] TABLE 67

| | | | | | | | | | |
|---|---|---|---|---|---|---|---|---|---|
| 11 | matrix | 37600_at | extracellular matrix | 66 | 103577_at | AI326331 | NM_133232 | NP_573495 | — |
| | protein | | protein 1, isoform 1, 2 | | | | | | |

| | | | | | | | | | | |
|---|---|---|---|---|---|---|---|---|---|---|
| 11 | A | 93.10% | inducible 6-phosphofructo- | 0.6 | A | 0.5 | A | 1.3 | A | Unpublished: - ( ) |
| | | | 2-kinase Putative Ortholog | | | | | | | |

| | | | | mouse | | | | | |
|---|---|---|---|---|---|---|---|---|---|
| | | human | | | mouse | | mouse_Ref | mouse_Ref | mouse_Map |
| cat# | category | Probe ID | title | # | Probe ID | GenBank | Seq | SeqP | Location |
| 12 | membrane | 1042_at | retinoic acid receptor | 67 | 116451_at | AA615200 | — | — | — |
| | protein | | responder (tazarotene | | | | | | |
| | | | induced) 1 | | | | | | |
| 12 | membrane | 33505_at | retinoic acid receptor | 67 | 116451_at | AA615200 | — | — | — |
| | protein | | responder tazarotene | | | | | | |
| | | | induced) 1 | | | | | | |
| 12 | membrane | 33331_at | BENE protein | | none | | | | |
| | protein | | | | | | | | |
| 12 | membrane | 33792_at | prostate stem cell | 68 | 160508_at | AW209486 | — | — | — |
| | protein | | antigen | | | | | | |
| 12 | membrane | 34280_at | Homo sapiens mRNA for | | — | AH009304 | NM_017369 | NP_059065 | — |
| | protein | | putative GABA receptor | | | | | | |
| | | | epsilon subunit | | | | | | |
| 12 | membrane | 34288_at | G protein-coupled receptor | 69 | 93430_at | AF000236 | NM_007722 | NP_031748 | 1 55.6 cM |
| | protein | | | | | | | | |
| 12 | membrane | 34898_at | amphiregulin (schwannoma- | 70 | 99915_at | L41352 | NM_009704 | NP_033834 | 5 51.0 cM |
| | protein | | derived growth factor) | | | | | | |
| 12 | membrane | 38223_at | vascular Rab-GAP/TBC- | 71 | 96339_at | AW048363 | NM_053257 | NP_444487 | — |
| | protein | | containing | | | | | | |
| 12 | membrane | 38223_at | vascular Rab-GAP/TBC- | 72 | 167252_at | AV106158 | NM_053257 | NP_444487 | — |
| | protein | | containing | | | | | | |
| 12 | membrane | 38223_at | vascular Rab-GAP/TBC- | 73 | 164621_i_at | AV157335 | NM_053257 | NP_444487 | — |
| | protein | | containing | | | | | | |
| 12 | membrane | 38379_at | glycoprotein | 74 | 108822_at | AI615758 | NM_053110 | NP_444340 | 6 21.0 cM |
| | protein | | (transmembrane) nmb | | | | | | |
| 12 | membrane | 38379_at | glycoprotein | 75 | 168624_at | AV223501 | NM_053110 | NP_444340 | 6 21.0 cM |
| | protein | | (transmembrane) nmb | | | | | | |
| 12 | membrane | 38750_at | Notch homolog 3 | 76 | 92956_at | X74760 | NM_008716 | NP_032742 | 17 20.0 cM |
| | protein | | | | | | | | |
| 12 | membrane | 39310_at | bradykinin receptor B2 | 77 | 98387_at | L26047 | NM_009747 | NP_033877 | 12 53.0 cM |
| | protein | | | | | | | | |
| 12 | membrane | 40990_at | tetraspan 5 | 78 | 129282_at | AW124518 | NM_019571 | NP_062517 | — |
| | protein | | | | | | | | |
| 12 | membrane | 40990_at | tetraspan 5 | 79 | 140325_at | AW125637 | NM_019571 | NP_062517 | — |
| | protein | | | | | | | | |
| 12 | membrane | 40990_at | tetraspan 5 | 80 | 163391_at | AW123971 | NM_019571 | NP_062517 | — |
| | protein | | | | | | | | |
| 12 | membrane | 40990_at | tetraspan 5 | 81 | 92426_at | AI877157 | NM_019571 | NP_062517 | — |
| | protein | | | | | | | | |
| 13 | metabolism | 32349_at | annexin A10 | 85 | 92494_at | AJ238978 | NM_011922 | NP_036052 | 8 32.0 cM |

| | mouse | | | MASM5 | | | | | | |
|---|---|---|---|---|---|---|---|---|---|---|
| | chip | homo- | | | 1 st | | 2nd | | 3 rd | |
| cat# | ID | logy | name | 1st | P/A | 2nd | P/A | 3rd | P/A | reference |
| 12 | B | 87.74% | expressed sequence AI662122 | 0.8 | A | 0.5 | A | 0.9 | A | — |
| | | | Putative Ortholog (highly | | | | | | | |
| | | | conserved) | | | | | | | |
| 12 | B | 87.74% | expressed sequence AI662122 | 0.8 | A | 0.5 | A | 0.9 | A | — |
| | | | Putative Ortholog (highly | | | | | | | |
| | | | conserved) | | | | | | | |
| 12 | | | | — | | | | — | | |
| 12 | A | 80.69% | prostate stem cell antigen | 1 | A | 0.71 | A | 1.3 | A | — |
| | | | Putative Ortholog | | | | | | | |
| 12 | — | 84.80% | gamma-aminobutyric acid | — | | — | | — | | Neurosci 2000 May |
| | | | (GABA-A) receptor, subunit | | | | | | | 15: 20(10): 3588-95 |
| 12 | A | 89.09% | chemokine orphan receptor 1 | 0.7 | M | 0.29 | P | 0.6 | P | Immunogenetics: - (1997) |
| | | | Putative Ortholog (highly | | | | | | | |
| | | | conserved) | | | | | | | |
| 12 | A | 83.58% | amphiregulin Homolog | 0.8 | M | 0.56 | A | 0.7 | A | Biochem. Biophys. Res. Commun. |
| | | | | | | | | | | 85: 103-109 (1992) |
| 12 | A | 95.63% | ribosomal protein L31 Putative | 0.5 | A | 0.91 | A | 0.6 | A | Meth. Enzymol. 303: 19-44 |
| | | | Ortholog | | | | | | | (1999) |
| 12 | C | 95.63% | ribosomal protein L31 Putative | 0.5 | A | 1.8 | A | 1.3 | A | Meth. Enzymol. 303: 19-44 |
| | | | Ortholog | | | | | | | (1999) |
| 12 | B | 95.63% | ribosomal protein L31 Putative | 0.9 | P | 1.1 | P | 1 | P | Meth. Enzymol. 303: 19-44 |
| | | | Ortholog | | | | | | | (1999) |
| 12 | B | 81.15% | glycoprotein (transmembrane) | 1.1 | M | 1.1 | M | 1.7 | A | J. Biol. Chem. 276: 8125- |
| | | | nmb Putative Ortholog (highly | | | | | | | 8134 (2001) |
| | | | conserved) | | | | | | | |
| 12 | C | 81.15% | glycoprotein (transmembrane) | 2.8 | A | 0.63 | A | 0.7 | A | J. Biol. Chem. 276: 8125- |
| | | | nmb Putative Ortholog (highly | | | | | | | 8134 (2001) |
| | | | conserved) | | | | | | | |
| 12 | A | 84.91% | Notch gene homolog 3, | 0.7 | P | 0.5 | P | 0.6 | P | Mech. Dev. 46: 123-136 (1994) |
| | | | (Drosophila) Putative Ortholog | | | | | | | |
| 12 | A | 85.67% | bradykinin receptor, beta 2 | 0.6 | A | 0.42 | A | 0.6 | A | Mol. Pharmacol. 44: 346-355 |
| | | | Putative Ortholog (highly | | | | | | | (1993) |
| | | | conserved) | | | | | | | |
| 12 | C | 93.28% | transmembrane 4 superfamily | 0.8 | A | 1 | P | 0.8 | A | Genome Res. 10: 1617-1630 |
| | | | member 9 Putative Ortholog | | | | | | | (2000) |
| 12 | C | 93.28% | transmembrane 4 superfamily | 1.5 | A | 1.2 | A | 1.2 | A | Genome Res. 10: 1617-1630 |
| | | | member 9 Putative Ortholog | | | | | | | (2000) |
| 12 | B | 93.28% | transmembrane 4 superfamily | 1 | P | 0.83 | P | 0.9 | P | Genome Res. 10: 1617-1630 |
| | | | member 9 Putative Ortholog | | | | | | | (2000) |
| 12 | A | 93.28% | transmembrane 4 superfamily | 0.6 | A | 2.7 | A | 0.4 | A | Genome Res. 10: 1617-1630 |
| | | | member 9 Putative Ortholog | | | | | | | (2000) |
| 13 | A | 87.74% | annexin A10 Putative Ortholog | 1.8 | A | 1.3 | A | 0.9 | A | Meth. Enzymol. 303: 19-44 |
| | | | | | | | | | | (1999) |

[0573] TABLE 68

| | | | | | | | | | |
|---|---|---|---|---|---|---|---|---|---|
| 13 | metabolism | 32464_at | defensin, beta 2 | | — | AJ011800 | NM_010030 | NP_034160 | 8 9.0 cM |
| 13 | metabolism | 36496_at | inositol(myo)-1(or 4)- | 83 | 98420_at | AA919924 | NM_053261 | NP_44449 | — |
| | | | monophosphatase 2 | | | | | | |
| 13 | metabolism | 37399_at | aldo-keto reductase family 1, | | AI605678 | — | — | — | — |
| | | | member C3 (3-alpha | | | | | | |
| | | | hydroxysteroid | | | | | | |
| | | | dehydrogenase, type II) | | | | | | |
| 13 | metabolism | 37482_at | aldo-keto reductase family 1, | 84 | 161918_at | AV380611 | NM_009731 | NP_033861 | 6 14.0 cM |
| | | | member B10 (aldose | | | | | | |
| | | | reductase) | | | | | | |
| 13 | metabolism | 37482_at | aldo-keto reductase family 1, | 85 | 102826_at | J05663 | NM_009731 | NP_033861 | 6 14.0 cM |
| | | | member B10 (aldose | | | | | | |
| | | | reductase) | | | | | | |
| 13 | metabolism | 37482_at | aldo-keto reductase family 1, | 86 | 132885_at | AI429094 | — | — | — |
| | | | member B10 (aldose | | | | | | |
| | | | reductase) | | | | | | |
| 13 | metabolism | 39799_at | fatty acid binding protein 5 | 87 | 160544_at | AJ223066 | NM_010634 | NP_034764 | — |
| | | | (psoriasis-associated) | | | | | | |
| 13 | metabolism | 39799_at | fatty acid binding protein 5 | 88 | 109764_at | AI840194 | NM_010634 | NP_034764 | — |
| | | | (psoriasis-associated) | | | | | | |

| | | | | | | | | | | |
|---|---|---|---|---|---|---|---|---|---|---|
| 13 | — | | defensin beta 2 (Defb2) | — | | — | | — | | FEBS Lett 1999 Jan |
| | | | | | | | | | | 8: 442(1): 112-6 |
| 13 | A | 88.21% | Mus musculus myo-inositol | 0.5 | A | 1.7 | A | 0.9 | A | Gene 271: 285-291 (2001) |
| | | | monophosphatase 2 (Impa2) | | | | | | | |
| | | | mRNA, complete cds Putative | | | | | | | |
| | | | Ortholog (highly conserved) | | | | | | | |
| 13 | — | 86.00% | ESTs, Weakly similar to | | | | | | | — |
| | | | DHBX_MOUSE Estradiol 17 | | | | | | | |
| 13 | A | | androgen regulated vas | 0.7 | A | 0.59 | A | 1.7 | A | J. Biol. Chem. 265: 19932- |
| | | | deferens protein Curated | | | | | | | 19936 (1993) |
| | | | Ortholog | | | | | | | |
| 13 | A | | androgen regulated vas | 1.4 | A | 0.42 | A | 0.9 | A | J. Biol. Chem. 265: 19932- |
| | | | deferens protein Curated | | | | | | | 19936 (1993) |
| | | | Ortholog | | | | | | | |
| 13 | C | 89.66% | ESTs, Moderately similar to | 0.7 | A | 1.6 | A | 0.4 | A | — |
| | | | ALDOSE REDUCTASE-RELATED | | | | | | | |
| | | | PROTEIN 2 [M. musculus] | | | | | | | |
| | | | Homolog | | | | | | | |
| 13 | A | 82.76% | fatty acid binding protein | 1.3 | P | 0.56 | P | 1.2 | P | J. Biol. Chem. 268: 17362- |
| | | | 5, epidermal Putative Ortholog | | | | | | | 17369 (1999) |
| 13 | B | 82.76% | fatty acid binding protein | 0.2 | A | 2.7 | P | 0.8 | A | J. Biol. Chem. 268: 17362- |
| | | | 5, epidermal Putative Ortholog | | | | | | | 17369 (1999) |

| | | | | mouse | | | | | |
|---|---|---|---|---|---|---|---|---|---|
| | | human | | | mouse | | mouse_Ref | mouse_Ref | mouse_Map |
| cat# | category | Probe ID | title | # | Probe ID | GenBank | Seq | SeqP | Location |
| 14 | MHC | 38095_i_at | major histocompatibility | 89 | 100998_at | M21932 | NM_010379 | NP_034509 | 17 18.64 cM |
| | | | complex, class II, DP | | | | | | |
| | | | beta 1 | | | | | | |
| 14 | MHC | 38095_i_at | major histocompatibility | 90 | 116266_at | AW122580 | NM_010382 | NP_034512 | 17 18.66 cM |
| | | | complex, class II, DP | | | | | | |
| | | | beta 1 | | | | | | |
| 14 | MHC | 38096_f_at | major histocompatibility | 89 | 100998_at | M21932 | NM_010379 | NP_034509 | 17 18.64 cM |
| | | | complex, class II, DP | | | | | | |
| | | | beta 1 | | | | | | |
| 14 | MHC | 38096_f_at | | 90 | 116266_at | AW122580 | NM_010382 | NP_034512 | 17 18.66 cM |
| 15 | MMP related | 1006_at | matrix metalloproteinase | 91 | 94724_at | Y13185 | NM_019471 | NP_062344 | — |
| | | | 10 preproprotein | | | | | | |
| 15 | MMP related | 31859_at | matrix metalloproteinase | 92 | 162369_f_at | AV239570 | NM_013599 | NP_038627 | 2 96.0 cM |
| | | | 9 preproprotein | | | | | | |
| 15 | MMP related | 31859_at | matrix metalloproteinase | 93 | 99957_at | X72795 | NM_013599 | NP_038627 | 2 96.0 cM |
| | | | 9 preproprotein | | | | | | |
| 15 | MMP related | 31859_at | matrix metalloproteinase | 94 | 168521_r_at | AV231860 | NM_013599 | NP_038627 | 2 96.0 cM |
| | | | 9 preproprotein | | | | | | |

| | mouse | | | MASM5 | | | | | | |
|---|---|---|---|---|---|---|---|---|---|---|
| | chip | homo- | | | 1 st | | 2nd | | 3 rd | |
| cat# | ID | logy | name | 1st | P/A | 2nd | P/A | 3rd | P/A | reference |
| 14 | A | 91.18% | histocompatibility 2, class | 1.1 | P | 1.6 | P | 1.7 | P | Cell 34: 179-188 (1983) |
| | | | II antigen A, beta 1 Putative | | | | | | | |
| | | | Ortholog | | | | | | | |
| 14 | B | 91.23% | histocompatibility 2, class | 0.7 | A | 1.5 | A | 1.7 | A | Proc. Natl. Acad. Sci. U.S.A. |
| | | | II antigen A, beta 1 Putative | | | | | | | 80: 7621-7625 (1983) |
| | | | Ortholog | | | | | | | |
| 14 | A | 91.18% | histocompatibility 2, class | 1.1 | P | 1.6 | P | 1.7 | P | Cell 34: 179-188 (1983) |
| | | | II antigen A, beta 1 Putative | | | | | | | |
| | | | Ortholog | | | | | | | |
| 14 | B | 91.23% | histocompatibility 2, class | 0.7 | A | 1.5 | A | 1.7 | A | Proc. Natl. Acad. Sci. U.S.A. |
| | | | II antigen A, beta 1 Putative | | | | | | | 80: 7621-7625 (1983) |
| | | | Ortholog | | | | | | | |
| 15 | A | 84.75% | matrix metalloproteinase 10 | 1.4 | A | 1.2 | A | 1.2 | A | J. Biol. Chem. 269 (14), |
| | | | Putative Ortholog (highly | | | | | | | 10363-10369 (1994) |
| | | | conserved) | | | | | | | |
| 15 | A | 83.10% | matrix metalloproteinase 9 | 2 | A | 1.8 | A | 1.2 | A | Biochem. Biophys. Res. |
| | | | Putative Ortholog (highly | | | | | | | Commun. 190: 732-740 (1993) |
| | | | conserved) | | | | | | | |
| 15 | A | 83.10% | matrix metalloproteinase 9 | 1 | A | 1.5 | A | 0.4 | A | Biochem. Biophys. Res. |
| | | | Putative Ortholog (highly | | | | | | | Commun. 190: 732-740 (1993) |
| | | | conserved) | | | | | | | |
| 15 | C | 83.10% | matrix metalloproteinase 9 | 1.9 | A | 0.53 | A | 1 | A | Biochem. Biophys. Res. |
| | | | Curated Ortholog | | | | | | | Commun. 190: 732-740 (1993) |

[0574] TABLE 69

| | | | | | | | | | |
|---|---|---|---|---|---|---|---|---|---|
| 16 | oncogenesis | 1915_s_at | cellular oncogene c-fos | 95 | 161716_at | AV252296 | NM_010234 | NP_034364 | 12 40.0 cM |
| | | | (complete sequence) | | | | | | |
| 16 | oncogenesis | 1915_s_at | cellular oncogene c-fos | 96 | 160901_at | V00727 | NM_010234 | NP_034364 | 12 40.0 cM |
| | | | (complete sequence) | | | | | | |
| 16 | oncogenesis | 1915_s_at | cellular oncogene c-fos | 97 | 167990_at | AA118615 | — | — | — |
| | | | (complete sequence) | | | | | | |
| 16 | oncogenesis | 1916_s_at | cellular oncogene c-fos | 95 | 161716_at | AV252296 | NM_010234 | NP_034364 | 12 40.0 cM |
| | | | (complete sequence) | | | | | | |
| 16 | oncogenesis | 1916_s_at | cellular oncogene c-fos | 96 | 160901_at | V00727 | NM_010234 | NP_034364 | 12 40.0 cM |
| | | | (complete sequence) | | | | | | |
| 16 | oncogenesis | 1916_s_at | cellular oncogene c-fos | 97 | 167990_at | AA118615 | — | — | — |
| | | | (complete sequence) | | | | | | |
| 16 | oncogenesis | 36933_at | N-myc downstream | 98 | 93506_at | AW121063 | NM_133668 | NP_598429 | — |
| | | | regulated gene 1 | | | | | | |
| 16 | oncogenesis | 36933_at | N-myc downstream | 99 | 160464_s_at | U60593 | NM_1010884 | NP_035014 | downstream |
| | | | regulated gene 1 | | | | | | of N-myc |
| 16 | oncogenesis | 37283_at | meningioma 1 | 100 | 110774_at | AI852667 | — | — | — |
| 16 | oncogenesis | 37821_at | breast carcinoma amplified | 101 | 163286_at | AW122051 | — | — | — |
| | | | sequence 1 | | | | | | |
| 16 | oncogenesis | 38827_at | anterior gradient 2 homolog | 102 | 101075_r_at | AB016592 | NM_011783 | NP_035913 | — |
| | | | (Xenepus laevis) | | | | | | |
| 16 | oncogenesis | 38827_at | anterior gradient 2 homolog | 103 | 101075_f_at | AB016592 | NM_011783 | NP_035913 | — |
| | | | (Xenepus laevis) | | | | | | |
| 16 | oncogenesis | 38827_at | anterior gradient 2 homolog | 104 | 162200_r_at | AV062476 | NM_011783 | NP_035913 | — |
| | | | (Xenepus laevis) | | | | | | |

| | | | | | | | | | | |
|---|---|---|---|---|---|---|---|---|---|---|
| 16 | A | | FBJ osteosarcoma oncogene | 0.7 | A | 1 | A | 0.7 | A | Cell 32: 1241-1255 (1983) |
| | | | Curated Ortholog | | | | | | | |
| 16 | A | 91.42% | FBJ osteosarcoma oncogene | 0.7 | P | 0.77 | P | 0.7 | P | Cell 32: 1241-1255 (1983) |
| | | | Homolog | | | | | | | |
| 16 | C | 91.49% | RIKEN cDNA 4933433D06 gene | 1 | A | 0.53 | A | 2.3 | A | — |
| | | | Putative Ortholog | | | | | | | |
| 16 | A | | FBJ osteosarcoma oncogene | 0.7 | A | 1 | A | 0.7 | A | Cell 32: 1241-1255 (1983) |
| | | | Curated Ortholog | | | | | | | |
| 16 | A | 91.42% | FBJ osteosarcoma oncogene | 0.7 | P | 0.77 | P | 0.7 | P | Cell 32: 1241-1255 (1983) |
| | | | Homolog | | | | | | | |
| 16 | C | 91.49% | RIKEN cDNA 4933433D06 gene | 1 | A | 0.53 | A | 2.3 | A | — |
| | | | Putative Ortholog | | | | | | | |
| 16 | A | 91.26% | solute carrier family 25 | 2.9 | A | 0.71 | A | 0.4 | A | Unpublished: - (2001) |
| | | | (mitochondrial carrier | | | | | | | |
| | | | adenine nucleotide translocator), | | | | | | | |
| | | | member 3 Putative Ortholog | | | | | | | |
| 16 | A | | N-myc downstream regulated 1 | 0.5 | A | 0.56 | A | 1.1 | A | Mech. Dev. 83: 1-2 (1999) |
| | | | Curated Ortholog | | | | | | | |
| 16 | B | 87.25% | ESTs, Weakly similar to MN1_HUMAN | 0.6 | A | 0.56 | A | 2.3 | A | — |
| | | | PROBABLE TUMOR SUPPRESSOR | | | | | | | |
| | | | PROTEIN MN1[H. sapiens] | | | | | | | |
| | | | Putative Ortholog | | | | | | | |
| 16 | B | 85.79% | RIKEN cDNA 2210416M21 gene | 0.8 | A | 0.67 | A | 0.8 | A | — |
| | | | Homolog | | | | | | | |
| 16 | A | 88.15% | anterior gradient 2 (Xenopus | 0.6 | A | 0.91 | A | 1 | A | Biochem. Biophys. Res. |
| | | | laevis) Putative Ortholog | | | | | | | Commun. 251: 111-116 (1998) |
| 16 | A | 88.15% | anterior gradient 2 (Xenopus | 8.4 | P | 11.8 | P | 21 | P | Biochem. Biophys. Res. |
| | | | laevis) Putative Ortholog | | | | | | | Commun. 251: 111-116 (1998) |
| 16 | A | 88.15% | anterior gradient 2 (Xenopus | 1 | A | 1.3 | A | 0.7 | A | Biochem. Biophys. Res. |
| | | | laevis) Putative Ortholog | | | | | | | Commun. 251: 111-116 (1998) |

| | | | | mouse | | | | | |
|---|---|---|---|---|---|---|---|---|---|
| | | human | | | mouse | | mouse_Ref | mouse_Ref | mouse_Map |
| cat# | category | Probe ID | title | # | Probe ID | GenBank | Seq | SeqP | Location |
| 17 | others | 1230_g_at | cisplatin resistance associated | 105 | 106584_at | AI152881 | — | — | — |
| 17 | others | 1230_g_at | cisplatin resistance associated | 106 | 171229_i_at | AV167772 | — | — | — |
| 17 | others | 32527_at | adipose specific 2 | | none | | | | |
| 17 | others | 32817_at | SEC14 (S. cerevisiae)-like 2 | | none | | | | |
| 17 | others | 38151_at | loss of heterozygosity, 11, | 107 | 162559_at | AI837711 | — | — | — |
| | | | chromosomal region 2, gene A | | | | | | |
| 17 | others | 38151_at | loss of heterozygosity, 11, | 108 | 168765_at | AV245837 | — | — | — |
| | | | chromosomal region 2, gene A | | | | | | |
| 17 | others | 38803_at | clone 24665 mRNA (neurocalcin | 109 | 111732_at | AA881910 | — | — | — |
| | | | delta) | | | | | | |
| 17 | others | 38803_at | clone 24665 mRNA (neurocalcin | 110 | 108756_at | AW045893 | NM_134094 | NP_598855 | — |
| | | | delta) | | | | | | |
| 17 | others | 38803_at | clone 24665 mRNA (neurocalcin | 111 | 112376_at | AW124163 | NM_134094 | NP_598855 | — |
| | | | delta) | | | | | | |

| | mouse | | | MASM5 | | | | | | |
|---|---|---|---|---|---|---|---|---|---|---|
| | chip | homo- | | | 1 st | | 2nd | | 3 rd | |
| cat# | ID | logy | name | 1st | P/A | 2nd | P/A | 3rd | P/A | reference |
| 17 | B | 91.87% | expressed sequence AI035306 | 0.5 | A | 0.39 | A | 0.6 | A | — |
| | | | Putative Ortholog | | | | | | | |
| 17 | C | 91.87% | expressed sequence AI035306 | 1.2 | A | 0.71 | A | 0.7 | A | — |
| | | | Putative Ortholog | | | | | | | |
| 17 | | | | — | | — | | — | | |
| 17 | | | | — | | — | | — | | |
| 17 | B | 90.34% | expressed sequence AW551984 | 1.2 | A | 1.5 | A | 1.8 | A | — |
| | | | Putative Ortholog | | | | | | | |
| 17 | C | 90.34% | expressed sequence AW551984 | 1.2 | A | 1.2 | A | 1 | A | — |
| | | | Putative Ortholog | | | | | | | |
| 17 | B | 100.00% | ESTs Putative Ortholog (highly | 1 | P | 0.91 | P | 1 | P | — |
| | | | conserved) | | | | | | | |
| 17 | B | | expressed sequence AI848120 | 1.1 | P | 0.91 | P | 0.7 | P | Unpublished: - (2001) |
| | | | Curated Ortholog | | | | | | | |
| 17 | B | | expressed sequence AI848120 | 1.2 | A | 1 | A | 2.5 | A | Unpublished: - (2001) |
| | | | Curated Ortholog | | | | | | | |

[0575] TABLE 70

| | | | | | | | | | |
|---|---|---|---|---|---|---|---|---|---|
| 17 | others | 38803_at | clone 24665 mRNA | 112 | 140699_at | AW124014 | — | — | — |
| | | | (neurocalcin delta) | | | | | | |
| 17 | others | 39827_at | RTP801 | 113 | 103460_at | AI849939 | — | — | — |
| 17 | others | 41641_at | GPI-anchored metastasis- | 114 | 163822_at | AA073823 | NM_133743 | NP_598504 | — |
| | | | associated protein homolog | | | | | | |
| 17 | others | 41641_at | GPI-anchored metastasis- | 115 | 169732_i_at | AV075775 | NM_133743 | NP_598504 | — |
| | | | associated protein homolog | | | | | | |

| | | | | | | | | | | |
|---|---|---|---|---|---|---|---|---|---|---|
| 17 | C | 100.00% | ESTs Putative Ortholog | 0.9 | A | 0.77 | A | 1.3 | A | — |
| | | | (highly conserved) | | | | | | | |
| 17 | A | 92.59% | RIKEN cDNA 5830413E08 gene | 1 | A | 1.1 | A | 1 | A | — |
| | | | Putative Ortholog (highly | | | | | | | |
| | | | conserved) | | | | | | | |
| 17 | B | 85.05% | GPI-anchored metastasis- | 1.5 | P | 0.67 | P | 1 | A | Genome Res. 10: 1617-1630 |
| | | | associated protein homolog | | | | | | | (2000) |
| | | | Putative Ortholog | | | | | | | |
| 17 | C | 85.05% | GPI-anchored metastasis- | 0.9 | A | 0.33 | A | 0.7 | A | Genome Res. 10: 1617-1630 |
| | | | associated protein homolog | | | | | | | (2000) |
| | | | Putative Ortholog | | | | | | | |

| | | | | mouse | | | | | |
|---|---|---|---|---|---|---|---|---|---|
| | | human | | | mouse | | mouse_Ref | mouse_Ref | mouse_Map |
| cat# | category | Probe ID | title | # | Probe ID | GenBank | Seq | SeqP | Location |
| 18 | P450 | 1371_s_at | cytochrome P450, subfamily | 116 | 102701_at | M21856 | — | AAA40425 | — |
| | | | IIB (phenobartital- | | | | | | |
| | | | inducible), polypeptide 6 | | | | | | |
| 18 | P450 | 1371_s_at | cytochrome P450, subfamily | 117 | 102690_at | AF047529 | NM_007814 | NP_031840 | 7 7.3 cM |
| | | | IIB (phenobarbital- | | | | | | |
| | | | inducible), polypeptide 6 | | | | | | |
| 18 | P450 | 37124_i_at | cytochrome P450, subfamily | | none | | | | |
| | | | IIIA, polypeptide 5 | | | | | | |
| 18 | P450 | 37125_f_at | cytochrome P450, subfamily | | none | | | | |
| | | | IIIA, polypeptide 5 | | | | | | |
| 19 | phosphatase | 1005_at | dual specificity | 118 | 168611_i_at | AV216941 | NM_013642 | NP_038670 | 17 13.0 cM |
| | | | phosphatase 1 | | | | | | |
| 19 | phosphatase | 1005_at | dual specificity | 119 | 104598_at | X61940 | NM_013642 | NP_038670 | 17 13.0 cM |
| | | | phosphatase 1 | | | | | | |
| 19 | phosphatase | 1364_at | protein tyrosine | 120 | 92380_r_at | AJ133130 | NM_011219 | NP_035349 | — |
| | | | phosphatase, receptor- | | | | | | |
| | | | type, Z polypeptide 1 | | | | | | |
| 19 | phosphatase | 1364_at | protein tyrosine | 121 | 169828_f_at | AV151279 | NM_011219 | NP_035349 | — |
| | | | phosphatase, receptor- | | | | | | |
| | | | type, Z polypeptide 1 | | | | | | |
| 19 | phosphatase | 1364_at | protein tyrosine | 122 | 134749_f_at | AI662731 | NM_011219 | NP_035349 | — |
| | | | phosphatase, receptor- | | | | | | |
| | | | type, Z polypeptide 1 | | | | | | |
| 19 | phosphatase | 1364_at | protein tyrosine | 123 | 165782_at | AW120652 | — | — | — |
| | | | phosphatase, receptor- | | | | | | |
| | | | type, Z polypeptide 1 | | | | | | |
| 20 | protein | 1566_at | insulin-like growth factor | 124 | 95083_at | X81581 | NM_008343 | NP_032369 | 11 1.35 cM |
| | binding | | binding protein 3 | | | | | | |
| | protein | | | | | | | | |
| 20 | protein | 1586_at | insulin-like growth factor | 125 | 95082_at | AI842277 | NM_008343 | NP_032369 | 11 1.35 cM |
| | binding | | binding protein 3 | | | | | | |
| | protein | | | | | | | | |

| | mouse | | | MASM5 | | | | | | |
|---|---|---|---|---|---|---|---|---|---|---|
| | chip | homo- | | | 1 st | | 2nd | | 3 rd | |
| cat# | ID | logy | name | 1st | P/A | 2nd | P/A | 3rd | P/A | reference |
| 18 | A | 86.47% | cytochrome P450, 2b10, | 0.8 | P | 0.67 | P | 0.8 | P | Biochemistry 27: 6434- |
| | | | phenobarbitol inducible, | | | | | | | 6443 (1998) |
| | | | type b Putative Ortholog | | | | | | | |
| | | | (highly conserved) | | | | | | | |
| 18 | A | 84.80% | cytochrome P450, 2b19 | 1.6 | A | 0.42 | A | 0.6 | A | Genomics 53: 417-419 |
| | | | Homolog | | | | | | | (1998) |
| 18 | | | | — | | — | | — | | |
| 18 | | | | — | | — | | — | | |
| 19 | C | | protein tyrosine phosphatase, | 1.2 | A | 1.2 | A | 0.7 | A | Oncogene 7: 187-190 |
| | | | non-receptor type 16 Curated | | | | | | | (1992) |
| | | | Ortholog | | | | | | | |
| 19 | A | 89.18% | protein tyrosine phosphatase, | 0.7 | P | 0.63 | P | 0.4 | P | Oncogene 7: 187-190 |
| | | | non-receptor type 16 Putative | | | | | | | (1992) |
| | | | Ortholog (highly conserved) | | | | | | | |
| 19 | A | | protein tyrosine phosphatase, | 1.3 | A | 0.77 | A | 1.4 | A | J. Neurosci. 19: 3888- |
| | | | receptor type, Z Curated | | | | | | | 3899 (1999) |
| | | | Ortholog | | | | | | | |
| 19 | C | | protein tyrosine phosphatase, | 1 | A | 1.9 | A | 0.6 | A | J. Neurosci. 19: 3888- |
| | | | receptor type, Z Curated | | | | | | | 3899 (1999) |
| | | | Ortholog | | | | | | | |
| 19 | C | | protein tyrosine phosphatase, | 0.9 | A | 0.83 | A | 0.6 | A | J. Neurosci. 19: 3888- |
| | | | receptor type, Z Curated | | | | | | | 3899 (1999) |
| | | | Ortholog | | | | | | | |
| 19 | C | 90.44% | Mus musculus, clone IMAGE: | 0.6 | A | 0.67 | A | 1.6 | P | — |
| | | | 3590815, mRNA, partial cds | | | | | | | |
| | | | Putative Ortholog (highly | | | | | | | |
| | | | conserved) | | | | | | | |
| 20 | A | 83.12% | insulin-like growth factor | 0.4 | A | 0.77 | A | 0.2 | A | Mol. Cell. Endocrinol. 104: |
| | | | binding protein 3 Putative | | | | | | | 57-66 (1994) |
| | | | Ortholog | | | | | | | |
| 20 | A | 83.12% | insulin-like growth factor | 1 | P | 0.18 | M | 0.2 | M | Mol. Cell. Endocrinol. 104: |
| | | | binding protein 3 Putative | | | | | | | 57-66 (1994) |
| | | | Ortholog | | | | | | | |

[0576] TABLE 71

| | | | | | | | | | |
|---|---|---|---|---|---|---|---|---|---|
| 20 | protein | 37319_at | insulin-like growth | 124 | 95083_at | X81581 | NM_008343 | NP_032369 | 11 1.35 cM |
| | binding | | factor binding | | | | | | |
| | protein | | protein 3 | | | | | | |
| 20 | protein | 37319_at | insulin-like growth | 125 | 95082_at | AI842277 | NM_008343 | NP_032369 | 11 1.35 cM |
| | binding | | factor binding | | | | | | |
| | protein | | protein 3 | | | | | | |
| 20 | protein | 1736_at | insulin-like growth | 126 | 103904_at | X81584 | NM_008344 | NP_032370 | — |
| | binding | | factor binding | | | | | | |
| | | | protein 6 | | | | | | |
| | protein | | | | | | | | |
| 20 | protein | 32149_at | microseminoprotein, beta | 127 | 100715_at | U89840 | NM_020597 | NP_065622 | — |
| | binding | | | | | | | | |
| | protein | | | | | | | | |

| | | | | | | | | | | |
|---|---|---|---|---|---|---|---|---|---|---|
| 20 | A | 83.12% | insulin-like growth | 0.4 | A | 0.77 | A | 0.2 | A | Mol. Cell. Endocrinol. 104: |
| | | | factor binding protein | | | | | | | 57-66 (1994) |
| | | | 3 Putative Ortholog | | | | | | | |
| 20 | A | 83.12% | insulin-like growth | 1 | P | 0.18 | M | 0.2 | M | Mol. Cell. Endocrinol. 104: |
| | | | factor binding protein | | | | | | | 57-66 (1994) |
| | | | 3 Putative Ortholog | | | | | | | |
| 20 | A | 83.27% | insulin-like growth | 0.7 | P | 0.63 | P | 0.7 | P | Mol. Cell. Endocrinol. 104: |
| | | | factor binding protein | | | | | | | 57-66 |
| | | | 6 Putative Ortholog | | | | | | | |
| | | | (highly | | | | | | | |
| | | | conserved) | | | | | | | |
| 20 | A | | beta-microseminoprotein | 2.1 | P | 1.1 | A | 0.9 | A | DNA Cell Biol. 18: 11-26 |
| | | | Curated Ortholog | | | | | | | (1999) |

| | | | | mouse | | | | | |
|---|---|---|---|---|---|---|---|---|---|
| | | human | | | mouse | | mouse_Ref | mouse_Ref | mouse_Map |
| cat# | category | Probe ID | title | # | Probe ID | GenBank | Seq | SeqP | Location |
| 21 | proteinase | 40717_at | cathepsin L2 | | none | | | | |
| 22 | proteinase | 33305_at | serine (or cysteine) | | — | AK018226 | XM_110043 | XP_110043 | — |
| | inhibitor | | proteinase inhibitor, | | | | | | |
| | | | clade B (ovalbumin), | | | | | | |
| | | | member 1 | | | | | | |
| 22 | proteinase | 33825_at | serine (or cysteine) | 128 | 103611_at | AB012693 | NM_010581 | NP_034711 | — |
| | inhibitor | | proteinase inhibitor, | | | | | | |
| | | | clade A (alpha-1 anti- | | | | | | |
| | | | proteinase, antitrypsin), | | | | | | |
| | | | member3 | | | | | | |
| 22 | proteinase | 38125_at | serine (or cysteine) | 129 | 94147_at | M33960 | NM_008871 | NP_032897 | — |
| | inhibitor | | proteinase inhibitor, | | | | | | |
| | | | clade E (nexin, | | | | | | |
| | | | plasminogen activator | | | | | | |
| | | | inhibitor type 1), member | | | | | | |
| | | | 1 | | | | | | |
| 22 | proteinase | 672_at | serine (or cysteine) | 129 | 94147_at | M33960 | NM_008871 | NP_032897 | — |
| | inhibitor | | proteinase inhibitor, | | | | | | |
| | | | clade E (nexin, | | | | | | |
| | | | plasminogen activator | | | | | | |
| | | | inhibitor type 1), member | | | | | | |
| | | | 1 | | | | | | |
| 22 | proteinase | 862_at | serine (or cysteine) | 130 | 170241_f_at | AV077498 | NM_009257 | NP_033283 | — |
| | inhibitor | | proteinase inhibitor, | | | | | | |
| | | | clade B (ovalbumin), | | | | | | |
| | | | member 5 | | | | | | |
| 22 | proteinase | 862_at | serine (or cysteine) | 131 | 100034_at | U54705 | NM_009257 | NP_033283 | — |
| | inhibitor | | proteinase inhibitor, | | | | | | |
| | | | clade B (ovalbumin), | | | | | | |
| | | | member 5 | | | | | | |
| 22 | proteinase | 862_at | serine (or cysteine) | 132 | 165730_at | AI646751 | NM_009257 | NP_033283 | — |
| | inhibitor | | proteinase inhibitor, | | | | | | |
| | | | clade B (ovalbumin), | | | | | | |
| | | | member 5 | | | | | | |
| 23 | S100 | 41096_at | S100 calcium-binding | 133 | 101634_at | M33212 | NM_008722 | NP_032748 | — |
| | | | protein A8 | | | | | | |
| 23 | S100 | 41096_at | S100 calcium-binding | 134 | 103448_at | M83218 | NM_013650 | NP_038678 | 3 43.6 cM |
| | | | protein A8 | | | | | | |

| | mouse | | | MASM5 | | | | | | |
|---|---|---|---|---|---|---|---|---|---|---|
| | chip | homo- | | | 1 st | | 2nd | | 3 rd | |
| cat# | ID | logy | name | 1st | P/A | 2nd | P/A | 3rd | P/A | reference |
| 21 | | | | | | | | | | |
| 22 | — | 75.00% | serine (or cysteine) | — | | — | | — | | — |
| | | | proteinase inhibitor, | | | | | | | |
| | | | clade B, member 1b | | | | | | | |
| 22 | A | 89.81% | integrin-associated | 1 | P | 1 | P | 1 | P | J. Cell Biol. 123: 485- |
| | | | protein Putative | | | | | | | 496 (1993) |
| | | | Ortholog | | | | | | | |
| 22 | A | 91.34% | serine (or cysteine) | 0.9 | P | 1.4 | P | 1 | P | Mol. Cell. Biol. 10: 1265- |
| | | | proteinase inhibitor, | | | | | | | 1269 (1990) |
| | | | clade E (nexin, plasminogen | | | | | | | |
| | | | activator inhibitor type | | | | | | | |
| | | | 1), member 1 Putative | | | | | | | |
| | | | Ortholog (highly conserved) | | | | | | | |
| 22 | A | 91.34% | serine (or cysteine) | 0.9 | P | 1.4 | P | 1 | P | Mol. Cell. Biol. 10: 1265- |
| | | | proteinase inhibitor, | | | | | | | 1269 (1990) |
| | | | clade E (nexin, plasminogen | | | | | | | |
| | | | activator inhibitor type | | | | | | | |
| | | | 1), member 1 Putative | | | | | | | |
| | | | Ortholog (highly conserved) | | | | | | | |
| 22 | C | | serine (or cysteine) | 0.5 | A | 0.39 | A | 0.7 | A | Unpublished: - ( ) |
| | | | proteinase inhibitor, | | | | | | | |
| | | | clade B (ovalbumin), | | | | | | | |
| | | | member 5 Curated Ortholog | | | | | | | |
| 22 | A | 86.74% | serine (or cysteine) | 0.5 | A | 0.91 | A | 1 | A | Unpublished: - ( ) |
| | | | proteinase inhibitor, | | | | | | | |
| | | | clade B (ovalbumin), | | | | | | | |
| | | | member 5 Putative | | | | | | | |
| | | | Ortholog | | | | | | | |
| 22 | C | 86.73% | serine (or cysteine) | 1.6 | A | 0.77 | A | 1.2 | A | Unpublished: - ( ) |
| | | | proteinase inhibitor, | | | | | | | |
| | | | clade B (ovalbumin), | | | | | | | |
| | | | member 5 Putative | | | | | | | |
| | | | Ortholog | | | | | | | |
| 23 | A | 94.83% | nucleophosmin 1 Putative | 1.1 | P | 1 | P | 1 | P | Chromosoma 96: 417-426 |
| | | | Ortholog (highly conserved) | | | | | | | (1988) |
| 23 | A | 94.83% | S100 calcium binding | 1.5 | P | 2 | P | 0.3 | P | Blood 79 (8), 1907-1915 |
| | | | protein A8 (calgranulin A) | | | | | | | (1992) |
| | | | Curated Ortholog | | | | | | | |

[0577] TABLE 72

| | | | | | | | | | |
|---|---|---|---|---|---|---|---|---|---|
| 23 | S100 | 41096_at | S100 calcium-binding | 135 | 165722_r_at | AV300070 | NM_008722 | NP_032748 | — |
| | | | protein A8 | | | | | | |
| 23 | S100 | 41096_at | S100 calcium-binding | 136 | 165723_at | AV295738 | NM_008722 | NP_032748 | — |
| | | | protein A8 | | | | | | |

| | | | | | | | | | | |
|---|---|---|---|---|---|---|---|---|---|---|
| 23 | C | 94.83% | nucleophosmin 1 Putative | 1.2 | A | 0.77 | A | 0.7 | A | Chromosoma 96: 417- |
| | | | Ortholog (highly conserved) | | | | | | | 426 (1988) |
| 23 | C | 94.83% | nucleophosmin 1 Putative | 0.5 | A | 1.7 | A | 1.1 | A | Chromosoma 96: 417- |
| | | | Ortholog (highly conserved) | | | | | | | 426 (1988) |

| | | | | mouse | | | | | |
|---|---|---|---|---|---|---|---|---|---|
| | | human | | | mouse | | mouse_Ref | mouse_Ref | mouse_Map |
| cat# | category | Probe ID | title | # | Probe ID | GenBank | Seq | SeqP | Location |
| 24 | signal | 1057_at | Human retinoic acid-binding | 137 | 137179_at | AI325535 | — | — | — |
| | transduction | | protein II (CRABP-II) gene | | | | | | |
| | | | exons 2-4 | | | | | | |
| 24 | signal | 1057_at | Human retinoic acid-binding | 138 | 100127_at | M35523 | — | AAA37454 | — |
| | transduction | | protein II (CRABP-II) gene | | | | | | |
| | | | exons 2-4 | | | | | | |
| 24 | signal | 41783_at | Human retinoic acid-binding | 137 | 137179_at | AI325535 | — | — | — |
| | transduction | | protein II (CRABP-II) gene | | | | | | |
| | | | exons 2-4 | | | | | | |
| 24 | signal | 41783_at | Human retinoic acid-binding | 138 | 100127_at | M35523 | — | AAA37454 | — |
| | transduction | | protein II (CRABP-II) gene | | | | | | |
| | | | exons 2-4 | | | | | | |
| 24 | signal | 35632_at | Cas-Br-M (murine) ectropic | 139 | 110236_at | AI430293 | — | — | — |
| | transduction | | retroviral transforming | | | | | | |
| | | | sequence b | | | | | | |
| 24 | signal | 514_at | Cas-Br-M (murine) ectropic | 139 | 110236_at | AI430293 | — | — | — |
| | transduction | | retroviral transforming | | | | | | |
| | | | sequence b | | | | | | |
| 24 | signal | 36524_at | Rho guanine nucleotide | 140 | 165779_i_at | AW124292 | — | — | — |
| | transduction | | exchange factor 4, isoform | | | | | | |
| | | | a NM_032995 Rho guanine | | | | | | |
| | | | nucleotide exchange factor | | | | | | |
| | | | 4, isoform b | | | | | | |
| 24 | signal | 39220_at | uteroglobin | 141 | 94291_at | L04503 | NM_011681 | NP_035811 | — |
| | transduction | | | | | | | | |
| 24 | signal | 1778_g_at | ras inhibitor | 142 | 109303_at | AI503500 | — | — | — |
| | transduction | | | | | | | | |
| 24 | signal | 1934_s_at | vascular endothelial growth | 143 | 94712_at | U73620 | NM_009506 | NP_033532 | 8 |
| | transduction | | factor C | | | | | | |
| 24 | signal | 32737_at | ras-related C3 botulinum toxin | 144 | 103579_at | X53247 | NM_009008 | NP_033034 | — |
| | transduction | | substrate 2 | | | | | | |
| 25 | structural | 34091_s_at | vimentin | 145 | 101046_at | X56397 | NM_011701 | NP_035831 | 2 7.0 cM |
| | protein | | | | | | | | |
| 25 | structural | 34091_s_at | vimentin | 146 | 162379_r_at | AV245272 | NM_011701 | NP_035831 | 2 7.0 cM |
| | protein | | | | | | | | |
| 25 | structural | 36113_s_at | troponin T1, skeletal, slow | 147 | 161361_s_at | AV213431 | NM_011618 | NP_035748 | 7 9.0 cM |
| | protein | | | | | | | | |
| 25 | structural | 36113_s_at | troponin T1, skeletal, slow | 148 | 101383_at | AJ131711 | NM_011618 | NP_035748 | 7 9.0 cM |
| | protein | | | | | | | | |
| 25 | structural | 36355_at | involucrin | 149 | 92739_at | L28819 | NM_008412 | NP_032438 | 3 45.2 cM |
| | protein | | | | | | | | |
| 25 | structural | 36790_at | tropomyosin 1 (alpha) | 150 | 113796_at | AI314966 | NM_024427 | NP_077745 | 9 40.0 cM |
| | protein | | | | | | | | |

| | mouse | | | MASM5 | | | | | | |
|---|---|---|---|---|---|---|---|---|---|---|
| | chip | homo- | | | 1 st | | 2nd | | 3 rd | |
| cat# | ID | logy | name | 1st | P/A | 2nd | P/A | 3rd | P/A | reference |
| 24 | C | 89.62% | cellular retinoic acid | 0.7 | A | 0.91 | A | 0.9 | A | — |
| | | | binding protein II | | | | | | | |
| | | | Putative Ortholog (highly | | | | | | | |
| | | | conserved) | | | | | | | |
| 24 | A | 89.62% | cellular retinoic acid | 1.7 | A | 0.44 | A | 0.5 | A | roc. Natl. Acad. Sci. U.S.A. |
| | | | binding protein II | | | | | | | 87: 6233-6237 (1990) |
| | | | Putative Ortholog (highly | | | | | | | |
| | | | conserved) | | | | | | | |
| 24 | C | 89.62% | cellular retinoic acid | 0.7 | A | 0.91 | A | 0.9 | A | — |
| | | | binding protein II | | | | | | | |
| | | | Putative Ortholog (highly | | | | | | | |
| | | | conserved) | | | | | | | |
| 24 | A | 89.62% | cellular retinoic acid | 1.7 | A | 0.44 | A | 0.5 | A | roc. Natl. Acad. Sci. U.S.A. |
| | | | binding protein II | | | | | | | 87: 6233-6237 (1990) |
| | | | Putative Ortholog (highly | | | | | | | |
| | | | conserved) | | | | | | | |
| 24 | B | 93.58% | expressed sequence AI429560 | 1.1 | P | 1.3 | P | 0.9 | P | — |
| | | | Putative Ortholog (highly | | | | | | | |
| | | | conserved) | | | | | | | |
| 24 | B | 93.58% | ESTs Putative Ortholog | 1.1 | P | 1.3 | P | 0.9 | P | — |
| | | | (highly conserved) | | | | | | | |
| 24 | C | 92.34% | ESTs, Weakly similar to | 0.8 | A | 0.91 | A | 1.8 | A | — |
| | | | VAV3_MOUSE VAV-3 PROTEIN | | | | | | | |
| | | | [M. musculus] Putative | | | | | | | |
| | | | Ortholog (highly conserved) | | | | | | | |
| 24 | A | | uteroglobin Curated Ortholog | 1 | P | 1 | P | 1.1 | P | Exp. Lung Res. 19: 67-75 |
| | | | | | | | | | | (1993) |
| 24 | B | 85.96% | Mus musculus, clone MGC: | 1.3 | A | 1.1 | A | 1.5 | A | — |
| | | | 12160 IMAGE: 3711198, mRNA, | | | | | | | |
| | | | complete cds Putative Ortholog | | | | | | | |
| 24 | A | 86.26% | vascular endothelial growth | 0.5 | A | 0.91 | A | 0.7 | A | Development 122: 3829-3837 |
| | | | factor C Homolog | | | | | | | (1996) |
| 24 | A | 92.98% | RAS-related C3 botulinum | 1.2 | P | 1.3 | P | 1 | P | Oncogene 5: 769-772 (1990) |
| | | | substrate 2 Curated Ortholog | | | | | | | |
| 25 | A | | vimentin Curated Ortholog | 1 | A | 0.77 | A | 0.9 | A | Gene 76: 171-175 (1989) |
| 25 | A | | vimentin Curated Ortholog | 0.9 | A | 1 | P | 0.7 | A | Gene 76: 171-175 (1989) |
| 25 | A | 89.53% | troponin T1, skeletal, slow | 1.8 | A | 0.35 | A | 1.3 | A | Gene 214: 1-2 (1998) |
| | | | Putative Ortholog (highly | | | | | | | |
| | | | conserved) | | | | | | | |
| 25 | A | 89.53% | troponin T1, skeletal, slow | 1.3 | P | 1.2 | A | 1 | P | Gene 214: 1-2 (1998) |
| | | | Putative Ortholog (highly | | | | | | | |
| | | | conserved) | | | | | | | |
| 25 | A | | involucrin Curated Ortholog | 1.2 | A | 0.91 | A | 0.7 | A | Mol. Biol. Evol. 10: 1136- |
| | | | | | | | | | | 1149 (1993) |
| 25 | B | | tropomyosin 1, alpha Curated | 0.8 | A | 1.2 | P | 1.4 | P | Mol. Cell. Biol. 8: 5561- |
| | | | Ortholog | | | | | | | 5565 (1988) |

[0578] TABLE 73

| | | | | | | | | | |
|---|---|---|---|---|---|---|---|---|---|
| 25 | structural | 36790_at | tropomyosin 1 (alpha) | 151 | 105003_at | AA939674 | NM_024427 | NP_077745 | 9 40.0 cM |
| | protein | | | | | | | | |
| 25 | structural | 36790_at | tropomyosin 1 (alpha) | 152 | 160532_at | M22479 | NM_024427 | NP_077745 | 9 40.0 cM |
| | protein | | | | | | | | |
| 25 | structural | 36791_g_at | tropomyosin 1 (alpha) | 150 | 113796_at | AI314966 | NM_024427 | NP_077745 | 9 40.0 cM |
| | protein | | | | | | | | |
| 25 | structural | 36791_g_at | tropomyosin 1 (alpha) | 151 | 105003_at | AA939674 | NM_024427 | NP_077745 | 9 40.0 cM |
| | protein | | | | | | | | |
| 25 | structural | 36791_g_at | tropomyosin 1 (alpha) | 152 | 160532_at | M22479 | NM_024427 | NP_077745 | 9 40.0 cM |
| | protein | | | | | | | | |
| 25 | structural | 36792_at | tropomyosin 1 (alpha) | 150 | 113796_at | AI314966 | NM_024427 | NP_077745 | 9 40.0 cM |
| | protein | | | | | | | | |
| 25 | structural | 36792_at | tropomyosin 1 (alpha) | 151 | 105003_at | AA939674 | NM_024427 | NP_077745 | 9 40.0 cM |
| | protein | | | | | | | | |
| 25 | structural | 36792_at | tropomyosin 1 (alpha) | 152 | 160532_at | M22479 | NM_024427 | NP_077745 | 9 40.0 cM |
| | protein | | | | | | | | |
| 25 | structural | 37160_at | small proline-rich | 153 | 100446_r_at | X91825 | NM_009265 | NP_033291 | 3 45.2 cM |
| | protein | | protein 1B (cornifin) | | | | | | |
| 25 | structural | 37160_at | small proline-rich | 154 | 10045_f_at | X91825 | NM_009265 | NP_033291 | 3 45.2 cM |
| | protein | | protein 1B (cornifin) | | | | | | |
| 25 | structural | 37160_at | small proline-rich | 155 | 164632_i_at | AV225959 | — | — | — |
| | protein | | protein 1B (cornifin) | | | | | | |
| 25 | structural | 37582_at | keratin 15 | 156 | 160852_at | D16313 | NM_008469 | NP_032495 | 11 58.5 cM |
| | protein | | | | | | | | |
| 25 | structural | 37582_at | keratin 15 | 157 | 164618_f_at | AV171812 | NM_008469 | NP_032495 | 11 58.5 cM |
| | protein | | | | | | | | |
| 25 | structural | 39569_at | envoplakin | 158 | 163295_at | AI561819 | NM_025276 | NP_079552 | — |
| | protein | | | | | | | | |

| | | | | | | | | | |
|---|---|---|---|---|---|---|---|---|---|
| 25 | B | tropomyosin 1, alpha Curated | 1 | A | 0.67 | A | 0.6 | A | Mol. Cell. Biol. 8: 5561-5565 |
| | | Ortholog | | | | | | | (1988) |
| 25 | A | tropomyosin 1, alpha Curated | 1 | P | 1 | P | 1 | P | Mol. Cell. Biol. 8: 5561-5565 |
| | | Ortholog | | | | | | | 0988) |
| 25 | B | tropomyosin 1, alpha Curated | 0.8 | A | 1.2 | P | 1.4 | P | Mol. Cell. Biol. 8: 5561-5565 |
| | | Ortholog | | | | | | | (1988) |
| 25 | B | tropomyosin 1, alpha Curated | 1 | A | 0.67 | A | 0.6 | A | Mol. Cell. Biol. 8: 5561-5565 |
| | | Ortholog | | | | | | | (1988) |
| 25 | A | tropomyosin 1, alpha Curated | 1 | P | 1 | P | 1 | P | Mol. Cell. Biol. 8: 5561-5565 |
| | | Ortholog | | | | | | | (1988) |
| 25 | B | tropomyosin 1, alpha Curated | 0.8 | A | 1.2 | P | 1.4 | P | Mol. Cell. Biol. 8: 5561-5565 |
| | | Ortholog | | | | | | | (1988) |
| 25 | B | tropomyosin 1, alpha Curated | 1 | A | 0.67 | A | 0.6 | A | Mol. Cell. Biol. 8: 5561-5565 |
| | | Ortholog | | | | | | | (1988) |
| 25 | A | tropomyosin 1, alpha Curated | 1 | P | 1 | P | 1 | P | Mol. Cell. Biol. 8: 5561-5565 |
| | | Ortholog | | | | | | | (1988) |
| 25 | A | small proline-rich protein | 1 | P | 0.83 | P | 1 | P | J. Invest. Dermatol. 106: |
| | | 1B Curated Ortholog | | | | | | | 294-304 (1996) |
| 25 | A | small proline-rich protein | 2.2 | A | 0.3 | A | 0.9 | A | J. Invest Dermatol. 106: |
| | | 1B Homolog | | | | | | | 294-304 (1996) |
| 25 | B | RIKEN cDNA C530009C10 gene | 0.6 | A | 2.2 | A | 1 | A | — |
| | | Putative Ortholog | | | | | | | |
| 25 | A | keratin complex 1, acidic, | 1.6 | A | 0.83 | A | 1.1 | A | Gene 138: 1-2 (1994) |
| | | gene 15 Curated Ortholog | | | | | | | |
| 25 | B | keratin complex 1, acidic, | 1.6 | P | 0.67 | P | 0.8 | P | Gene 138: 1-2 (1994) |
| | | gene 15 Curated Ortholog | | | | | | | |
| 25 | B | envoplakin Curated Ortholog | 1.4 | A | 0.83 | A | 1.7 | A | Meth. Enzymol. 303: 19-44 |
| | | | | | | | | | (1999) |

| | | | | mouse | | | | | |
|---|---|---|---|---|---|---|---|---|---|
| | | human | | | mouse | | mouse_Ref | mouse_Ref | mouse_Map |
| cat# | category | Probe ID | title | # | Probe ID | GenBank | Seq | SeqP | Location |
| 26 | transcription | 1452_at | LIM domain only 4 | 159 | 98122_at | AF074600 | NM_010723 | NP_034853 | 73.1 cM |
| | factor | | | | | | | | |
| 26 | transcription | 33439_at | on factor 8 (represses | 160 | 99052_at | D76432 | NM_011546 | NP_035676 | 18 0.0 cM |
| | factor | | interleukin 2 expression) | | | | | | |
| 26 | transcription | 34216_at | Kruppel-like factor 7 | 161 | 104645_at | AI853712 | NM_033563 | NP_291041 | 1C1-C3 |
| | factor | | (ubiquitous) | | | | | | |
| 26 | transcription | 34216_at | Kruppel-like factor 7 | 162 | 112898_at | AW045576 | NM_033563 | NP_291041 | 1C1-C3 |
| | factor | | (ubiquitous) | | | | | | |
| 26 | transcription | 34216_at | Kruppel-like factor 7 | 163 | 107020_at | AW049268 | NM_033563 | NP_291041 | 1C1-C3 |
| | factor | | (ubiquitous) | | | | | | |
| 26 | transcription | 34216_at | Kruppel-like factor 7 | 164 | 114906_at | AI646497 | NM_033563 | NP_291041 | 1C1-C3 |
| | factor | | (ubiquitous) | | | | | | |
| 26 | transcription | 35425_at | BarH-like homeobox 2 | 165 | 100736_at | L77900 | NM_013800 | NP_038828 | — |
| | factor | | | | | | | | |
| 26 | transcription | 36619_r_at | inhibitor of DNA binding | 166 | 100050_at | M31885 | — | AAA37879 | — |
| | factor | | 1, dominant negative | | | | | | |
| | | | helix-loop-helix protein | | | | | | |

| | mouse | | | MASM5 | | | | | | |
|---|---|---|---|---|---|---|---|---|---|---|
| | chip | homo- | | | 1 st | | 2nd | | 3 rd | |
| cat# | ID | logy | name | 1st | P/A | 2nd | P/A | 3rd | P/A | reference |
| 26 | A | 95.77% | LIM only 4 Putative | 1.2 | P | 1.3 | P | 1.3 | P | Proc. Natl. Acad. Sci. U.S.A. |
| | | | Ortholog (highly conserved) | | | | | | | 95: 11257-11262 (1998) |
| 26 | A | 95.71% | zinc finger homeobox 1a | 1 | P | 0.77 | P | 0.7 | P | Gene 169: 289-290 (1996) |
| | | | Putative Ortholog | | | | | | | |
| 26 | A | 94.84% | Kruppel-like factor 7 | 1 | P | 0.77 | P | 0.6 | P | Unpublished: - ( ) |
| | | | (ubiquitous) Putative | | | | | | | |
| | | | Ortholog (highly conserved) | | | | | | | |
| 26 | B | 94.84% | Kruppel-like factor 7 | 1.3 | P | 1 | P | 1.2 | P | Unpublished: - ( ) |
| | | | (ubiquitous) Putative | | | | | | | |
| | | | Ortholog (highly conserved) | | | | | | | |
| 26 | B | 94.84% | Kruppel-like factor 7 | 0.7 | P | 1.1 | A | 0.9 | A | Unpublished: - ( ) |
| | | | (ubiquitous) Putative | | | | | | | |
| | | | Ortholog (highly conserved) | | | | | | | |
| 26 | B | 94.84% | Kruppel-like factor 7 | 0.7 | P | 1.1 | P | 0.7 | P | Unpublished: - ( ) |
| | | | (ubiquitous) Putative | | | | | | | |
| | | | Ortholog (highly conserved) | | | | | | | |
| 26 | A | 93.70% | BarH-like homeobox 2 | 0.4 | A | 0.59 | A | 0.5 | A | Proc. Natl. Acad. Sci. U.S.A. |
| | | | Putative Ortholog | | | | | | | 94: 2632-2637 (1997) |
| 26 | A | | inhibitor of DNA binding 1 | 0.9 | P | 0.71 | P | 0.7 | P | Cell 61: 49-59 (1990) |
| | | | Curated Ortholog | | | | | | | |

[0579] TABLE 74

| | | | | | | | | | |
|---|---|---|---|---|---|---|---|---|---|
| 26 | transcription | 41246_at | DKFZP56611024 protein | 167 | 97487_at | X70296 | NM_009255 | NP_033281 | 1 48.6 Cm |
| | factor | | | | | | | | |

| | | | | | | | | | | |
|---|---|---|---|---|---|---|---|---|---|---|
| 26 | A | 91.61% | serine (or cysteine) proteinase | 1.2 | A | 1.1 | A | 1.3 | A | EMBO J. 12: 1871-1878 (1993) |
| | | | inhibitor, clade E (nexin, plasminogen | | | | | | | |
| | | | activator inhibitor type 1), member 2 | | | | | | | |
| | | | Putative Ortholog | | | | | | | |

| | | | | mouse | | | | | |
|---|---|---|---|---|---|---|---|---|---|
| | | human | | | mouse | | mouse_Ref | mouse_Ref | mouse_Map |
| cat# | category | Probe ID | title | # | Probe ID | GenBank | Seq | SeqP | Location |
| 27 | transporter | 1932_at | ATP-binding cassette, sub- | 168 | 103800_at | AB019003 | NM_013790 | NP_038818 | 16 14.0 cM |
| | | | family C, member 5 | | | | | | |
| 27 | transporter | 1932_at | ATP-binding cassette, sub- | 169 | 165744_at | AW124768 | NM_013790 | NP_038818 | 16 14.0 cM |
| | | | family C, member 5 | | | | | | |
| 27 | transporter | 1932_at | ATP-binding cassette, sub- | 170 | 169447_r_at | AV168159 | NM_013790 | NP_038818 | 16 14.0 cM |
| | | | family C, member 5 | | | | | | |
| 27 | transporter | 32531_at | connexin 43 | 171 | 100064_f_at | M63801 | NM_010288 | NP_034418 | 10 29.0 cM |
| 27 | transporter | 32531_at | connexin 43 | 172 | 100065_r_at | M63801 | NM_010288 | NP_034418 | 10 29.0 cM |
| 27 | transporter | 32909_at | Aqaporin-5 | 173 | 113916_at | AI182792 | NM_009701 | NP_033831 | 15 56.8 cM |
| 27 | transporter | 37591_at | uncoupling protein 2 | 174 | 92792_at | U69135 | NM_011671 | NP_035801 | 7 50.0 cM |
| 27 | transporter | 39682_at | sodium channel, nonvoltage- | 175 | 110692_at | AI606632 | NM_011325 | NP_035455 | 7 56.0 cM |
| | | | gated 1, beta | | | | | | |
| 27 | transporter | 40297_at | six transmembrane epithelial | | — | AK010437 | NM_027399 | NP_081675 | 5 3.0 cM |
| | | | antigen of the prostate | | | | | | |
| 27 | transporter | 40339_at | gamma-aminobutyric acid | 176 | 163918_at | AV216203 | — | — | — |
| | | | (GABA) A receptor | | | | | | |
| 27 | transporter | 40339_at | gamma-aminobutyric acid | 177 | 169112_r_at | AV216203 | — | — | — |
| | | | (GABA) A receptor | | | | | | |
| | | 33546_at | clone = IMAGE-2448791 | | none | | | | |
| | | 38262_at | clone 23620 mRNA | 178 | 140497_at | AW124202 | — | — | — |
| | | 40191_s_at | clone IMAGE 21721 | 179 | 131152_at | AW142707 | — | — | — |

| | mouse | | | MASM5 | | | | | | |
|---|---|---|---|---|---|---|---|---|---|---|
| | chip | homo- | | | 1 st | | 2nd | | 3 rd | |
| cat# | ID | logy | name | 1st | P/A | 2nd | P/A | 3rd | P/A | reference |
| 27 | A | 90.79% | ATP-binding cassette, sub-family C, | 0.9 | A | 1 | A | 1 | P | Biochim. Biophys. Acta, |
| | | | member 5a | | | | | | | 1461: 347-357 (1999) |
| 27 | C | 98.08% | ATP-binding cassette, sub-family C | 0.8 | A | 1.5 | A | 1.2 | A | Biochim. Biophys. Acta, |
| | | | (CFTR/MRP), member 5a Curated | | | | | | | 1461: 347-357 (1999) |
| | | | Ortholog | | | | | | | |
| 27 | C | | ATP-binding cassette, sub-family C | 3.1 | A | 3 | A | 0.4 | A | Biochim. Biophys. Acta, |
| | | | (CFTR/MRP), member 5a Curated | | | | | | | 1461: 347-357 (1999) |
| | | | Ortholog | | | | | | | |
| 27 | A | | gap junction membrane channel | 1.1 | P | 1.4 | P | 1.1 | P | J. Biol. Chem. 266: 7971-7974 |
| | | | protein alpha 1 Curated Ortholog. | | | | | | | (1991) |
| 27 | A | | gap junction membrane channel | 1.2 | P | 0.91 | P | 0.9 | P | J. Biol. Chem. 266: 7971-7974 |
| | | | protein alpha 1 Curated Ortholog | | | | | | | (1991) |
| 27 | B | | aquaporin 5 Curated Ortholog | 0.8 | P | 0.83 | P | 0.6 | P | Mamm. Genome 10: 498-505 |
| | | | | | | | | | | (1999) |
| 27 | A | 91.28% | uncoupling protein 2, mitochondrial | 1.5 | A | 1.3 | A | 0.8 | A | Diabetes 46: 900-906 (1997) |
| | | | Homolog | | | | | | | |
| 27 | B | 87.58% | sodium channel, nonvoltage-gated 1 | 0.4 | P | 0.36 | A | 0.2 | A | Am. J. Physiol. 277: - (l999) |
| | | | beta Putative Ortholog (highly | | | | | | | |
| | | | conserved) | | | | | | | |
| 27 | — | 81.00% | six transmembrane epithelial antigen | — | | — | | — | | Nature 409 (6821), 685-690 (2001) |
| | | | of the prostate | | | | | | | |
| 27 | B | 88.69% | Mus musculus, clone MGC: 28005 | 1.2 | P | 1.5 | P | 1 | P | — |
| | | | IMAGE: 3602400, mRNA, complete | | | | | | | |
| | | | cds Putative Ortholog (highly | | | | | | | |
| | | | conserved) | | | | | | | |
| 27 | C | 88.69% | Mus musculus, clone MGC: 28005 | 1.4 | A | 1.4 | A | 1 | A | — |
| | | | IMAGE: 3602400, mRNA, complete | | | | | | | |
| | | | cds Putative Ortholog (highly | | | | | | | |
| | | | conserved) | | | | | | | |
| | C | 83.44% | ESTs Putative Ortholog (highly | 0.8 | P | 0.77 | P | 1.6 | P | — |
| | | | conserved) | | | | | | | |
| | C | 89.92% | Mus musculus, Similar to KIAA0582 | 0.8 | A | 0.71 | A | 0.8 | A | — |
| | | | protein, clone MGC: 6990 | | | | | | | |
| | | | IMAGE: 3154964, mRNA, complete | | | | | | | |
| | | | cds Putative Ortholog | | | | | | | |

[0580] TABLE 75

| | | | | | mouse | | | | |
|---|---|---|---|---|---|---|---|---|---|
| | | human | | | mouse | | mouse_Ref | mouse_Ref | mouse_Map |
| cat# | category | Probe ID | title | # | Probe ID | GenBank | Seq | SeqP | Location |
| 2 | cell adhesion | 47119_at | desmocollin 3 isoform a, b | 1 | 97655_at | Y11169 | NM_007882 | NP_031908 | 18 7.0 cM |
| 2 | cell adhesion | 79615_at | desmocollin 3 isoform a, b | 1 | 97655_at | Y11169 | NM_007882 | NP_031908 | 18 7.0 cM |
| 5 | cytokine | 42969_at | interleukin 20 receptor, alpha | | — | BB850070 | — | — | — |
| | related | | | | | | | | |
| 7 | enzyme | 56373_at | UDP-Gal: betaGlcNAc beta | 2 | 106071_at | AI852199 | — | — | — |
| | | | 1,4-galactosyltransferase, | | | | | | |
| | | | polypeptide 5 | | | | | | |
| 7 | enzyme | 56373_at | UDP-Gal: betaGlcNAc beta | 3 | 109537_at | AW122637 | NM_019835 | NP_062809 | — |
| | | | 1,4-galactosyltransferase, | | | | | | |
| | | | polypeptide 5 | | | | | | |
| 7 | enzyme | 58023_at | glutathione S-transferase A3 | 4 | 93015_at | X65021 | NM_010356 | NP_034486 | 9 48.0 cM |
| 7 | enzyme | 58023_at | glutathione S-transferase A3 | 5 | 164617_i_at | AV168894 | NM_010356 | NP_034486 | 9 48.0 cM |
| 7 | enzyme | 45605_at | long-chain fatty-acyl elongase | 6 | 103665_at | AW12253 | NM_130450 | NP_569717 | — |
| 7 | enzyme | 45605_at | long-chain fatty-acyl elongase | 7 | 94418_at | AI839004 | NM_130450 | NP_569717 | — |
| 8 | hypothetical | 43546_at | hypothetical protein FLJ12541 | 8 | 102258_at | AF062476 | NM_009294 | NP_033317 | — |
| | protein | | similar to Stra6 | | | | | | |
| 8 | hypothetical | 43853_at | HiF-1 responsive RTP801 | 9 | 103460_at | AI849939 | NM_029083 | NP_083359 | — |
| | protein | | | | | | | | |
| 8 | hypothetical | 44682_at | hypothetical protein | | none | | | | |
| | protein | | DKFZp434KI210 | | | | | | |
| 8 | hypothetical | 44705_at | hypothetical protein HSPC195 | 10 | 167736_r_at | AV212218 | NM_133687 | NP_598448 | — |
| | protein | | | | | | | | |
| 8 | hypothetical | 44705_at | hypothetical protein HSPC195 | 11 | 95701_at | AW124069 | NM_133687 | NP_598448 | — |
| | protein | | | | | | | | |
| 8 | hypothetical | 45563_f_at | hypothetical protein FLJ23309 | 12 | 110541_at | AI643915 | — | — | 19 24.5 cM |
| | protein | | | | | | | | |
| 8 | hypothetical | 45563_f_at | hypothetical protein FLJ23309 | 13 | 106088_at | AI844788 | — | — | 19 24.5 cM |
| | protein | | | | | | | | |

| | mouse | | | MASM5 | | | | | | |
|---|---|---|---|---|---|---|---|---|---|---|
| | chip | homo- | | | 1 st | | 2nd | | 3 rd | |
| cat# | ID | logy | name | 1st | P/A | 2nd | P/A | 3rd | P/A | reference |
| 2 | A | 87.58% | desmocollin 3 Curated Ortholog | 0.345 | A | 0.769 | A | 1.2 | A | Dev. Dyn. 210: 315-327 (1997) |
| 2 | A | 87.58% | desmocollin 3 Curated Ortholog | 0.345 | A | 0.769 | A | 1.2 | A | Dev. Dyn. 210: 315-327 (1997) |
| 5 | — | 87.90% | ESTs | — | | — | | | | — |
| 7 | B | 95.11% | RIKEN cDNA 8430404F20 gene | 0.556 | P | 0.909 | A | 0.909 | A | — |
| | | | Homolog | | | | | | | |
| 7 | B | 95.11% | UDP-Gal: betaGlcNAc beta 1,4- | 6.9 | A | 0.4 | A | 0.769 | A | Published Only in DataBase (2000) |
| | | | galactosyltransferase, polypeptide 5 | | | | | | | |
| | | | Putative Ortholog (highly conserved) | | | | | | | |
| 7 | A | 86.67% | glutathione S-transferase, alpha 3 | 1 | P | 0.625 | P | 0.556 | P | Cancer Res. 52: 314-318 (1992) |
| | | | Putative Ortholog | | | | | | | |
| 7 | B | 86.67% | glutathione S-transferase, alpha 3 | 2 | A | 1.5 | A | 1.3 | A | Cancer Res. 52: 314-318 (1992) |
| | | | Putative Ortholog | | | | | | | |
| 7 | A | 99.19% | long chain fatty acyl elongase | 1 | P | 1.1 | P | 1 | A | Unpublished: - (2001) |
| | | | Putative Ortholog | | | | | | | |
| 7 | A | 99.19% | long chain fatty acyl elongase | 0.4 | A | 1.7 | P | 1.7 | P | Unpublished: - (2001) |
| | | | Putative Ortholog | | | | | | | |
| 8 | A | 81.75% | stimulated by retinoic acid gene6 | 0.455 | A | 0.5 | A | 1.5 | A | Dev. Biol. 170: 420-433 (1995) |
| | | | Putative Ortholog (highly conserved) | | | | | | | |
| 8 | A | 92.59% | RIKEN cDNA 5830413E08 gene | 0.333 | A | 1 | A | 1.1 | A | — |
| | | | Putative Ortholog | | | | | | | |
| 8 | | | | | | | | | | |
| 8 | C | 98.43% | RIKEN cDNA 4930415K17 gene | 1.4 | A | 1.2 | A | 0.909 | A | Genome Res. 10: 1617-1630 (2000) |
| | | | Putative Ortholog | | | | | | | |
| 8 | A | 98.43% | RIKEN CDNA 4930415K17 gene | 0.909 | P | 0.294 | A | 0.909 | P | Genome Res. 10: 1617-1630 (2000) |
| | | | Putative Ortholog | | | | | | | |
| 8 | B | 87.52% | DNA segment, Chr 19, Wayne | 1.3 | P | 1.1 | A | 0.5 | A | — |
| | | | State University 12, expressed | | | | | | | |
| | | | Homolog | | | | | | | |
| 8 | B | 87.52% | DNA segment, Chr 19. Wayne | 1.2 | A | 1.7 | A | 3.1 | A | — |
| | | | State University 13, expressed | | | | | | | |
| | | | Homolog | | | | | | | |

[0581] TABLE 76

| | | | | | | | | | |
|---|---|---|---|---|---|---|---|---|---|
| 8 | hypothetical | 46924_at | hypothetical protein MGC12536 | 14 | 165731_at | AV204596 | — | — | — |
| | protein | | | | | | | | |
| 8 | hypothetical | 47534_at | hypothetical protein FLJ23516 | 15 | 162562_at | AI840292 | NM_023270 | NP_075759 | — |
| | protein | | | | | | | | |
| 8 | hypothetical | 47534_at | hypothetical protein FLJ23516 | 16 | 108010_at | AW210455 | NM_023270 | NP_075759 | — |
| | protein | | | | | | | | |
| 8 | hypothetical | 52072_at | hypothetical protein FLJ10718 | | none | | | | |
| | protein | | | | | | | | |
| 8 | hypothetical | 54030_at | hypothetical protein FLJ20373 | | — | AW046177 | — | — | — |
| | protein | | | | | | | | |
| 8 | hypothetical | 55924_at | hypothetical protein MGC14128 | | none | | | | |
| | protein | | | | | | | | |
| 8 | hypothetical | 51669_r_at | hypothetical protein MGC14128 | | none | | | | |
| | protein | | | | | | | | |
| 8 | hypothetical | 57777_at | hypothetical protein PRO1489 | 17 | 162963_at | AI835402 | — | — | — |
| | protein | | | | | | | | |
| 8 | hypothetical | 42473_at | Homo sapiens cDNA FLJ11971 fis, | | none | | | | |
| | protein | | clone HEMBB1001208 | | | | | | |
| 8 | hypothetical | 43412_s_at | hypothetical protein MGC16207 | | none | | | | |
| | protein | | | | | | | | |
| 8 | hypothetical | 46104_at | Homo sapiens mRNA; cDNA | 18 | 115700_at | AI314284 | NM_025807 | NP_080083 | — |
| | protein | | DKFZp434H1235 (from clone | | | | | | |
| | | | DKFZp434H1235): partial cds | | | | | | |
| 8 | hypothetical | 46293_at | Homo sapiens cDNA FLJ31097 fis, | | — | AK008761 | NM_028841 | NP_083117 | — |
| | protein | | clone IMR321000210 | | | | | | |
| 8 | hypothetical | 46700_at | Homo sapiens mRNA; cDNA | | none | | | | |
| | protein | | DKFZp586E1624 (from clone | | | | | | |
| | | | DKFZp586E1624) | | | | | | |
| 8 | hypothetical | 47432_at | prostate cancer associated protein 1 | 19 | 106880_at | AW121537 | — | — | — |
| | protein | | | | | | | | |
| 8 | hypothetical | 48086_at | Homo sapiens cDNA FLJ30086 fis, | 20 | 102018_at | AI854879 | — | — | — |
| | protein | | clone BNGH41000002, moderately | | | | | | |
| | | | similar to ADENYLOSUCCINATE | | | | | | |
| | | | SYNTHETASE, MUSCLE ISOZYME | | | | | | |
| | | | (EC 6.3.4.4) | | | | | | |
| 8 | hypothetical | 48539_at | Homo sapiens cDNA: FLJ22539 fis, | | none | | | | |
| | protein | | clone HRC13227 | | | | | | |
| 8 | hypothetical | 52634_at | Homo sapiens mRNA: cDNA | 21 | 115700_at | AI314284 | NM_025807 | NP_080083 | — |
| | protein | | DKFZp434H1235 (from clone | | | | | | |
| | | | DKFZp434H1235); partial cds | | | | | | |
| 8 | hypothetical | 52637_at | Homo sapiens mRNA: cDNA | 21 | 115700_at | AI314284 | NM_025807 | NP_080083 | — |
| | protein | | DKFZp434H1235 (from clone | | | | | | |
| | | | DKFZp434H1235); partial cds | | | | | | |
| 8 | hypothetical | 58531_at | KIAA1547 protein | | — | X73360 | — | CAA51770 | — |
| | protein | | | | | | | | |
| 8 | hypothetical | 59136_at | Homo sapiens cDNA FLJ30761 fis, | | none | | | | |
| | protein | | clone FEBRA2000538 | | | | | | |

| | | | | | | | | | | |
|---|---|---|---|---|---|---|---|---|---|---|
| 8 | C | 88.24% | RIKEN cDNA 2310005G05 gene | 1.8 | A | 1.7 | A | 0.5 | A | — |
| | | | Putative Ortholog | | | | | | | |
| 8 | B | 94.29% | RIKEN cDNA 1300002C13 gene | 2 | A | 1.8 | A | 2 | A | Genome Res. 10: 1617-1630 (2000) |
| | | | Putative Ortholog (highly conserved) | | | | | | | |
| 8 | B | 94.29% | RIKEN cDNA 1300002C13 gene | 1.2 | P | 2.2 | P | 1.4 | A | Genome Res. 10: 1617-1630 (2000) |
| | | | Putative Ortholog (highly conserved) | | | | | | | |
| 8 | | | | | | | | | | |
| 8 | | 84.20% | expressed sequence AW046177 | — | | — | | — | | — |
| 8 | | | | — | | — | | — | | |
| 8 | | | | — | | — | | — | | |
| 8 | B | 92.56% | expressed sequence AI891706 | 0.667 | P | 0.526 | P | 0.667 | P | — |
| | | | Putative Ortholog | | | | | | | |
| 8 | | | | — | | — | | — | | |
| 8 | | | | | | | | | | |
| 8 | B | 91.77% | RIKEN cDNA 1200003C 15 gene | 1.3 | P | 1.1 | P | 1.1 | P | — |
| | | | Putative Ortholog (highly conserved) | | | | | | | |
| 8 | — | | RIKEN CDNA 2210021G21 | — | | — | | — | | Meth. Enzymol. 303, 19-44 (1999) |
| 8 | | | | — | | — | | | | |
| 8 | B | 88.00% | expressed sequence AW045895 | 1.1 | A | 1.2 | A | 1.2 | A | — |
| | | | Putative Ortholog | | | | | | | |
| 8 | A | 98.00% | RIKEN cDNA 1500001K17 gene | 1 | P | 1.1 | P | 1 | P | — |
| | | | Putative | | | | | | | |
| 8 | | | | | | | | | | |
| 8 | B | 84.14% | RIKEN cDNA 1200003C15 gene | 1.3 | P | 1.1 | P | 1.1 | P | — |
| | | | Putative Ortholog (highly conserved) | | | | | | | |
| 8 | B | 84.14% | RIKEN cDNA 1200003C15 gene | 1.3 | P | 1.1 | P | 1.1 | P | — |
| | | | Putative Ortholog (highly conserved) | | | | | | | |
| 8 | — | 97.00% | EGS protein | — | | — | | — | | Eur. J. Biochem. 216 (1). 343-352 |
| | | | | | | | | | | (1993) |
| 8 | | | | — | | — | | — | | |

[0582] TABLE 77

| | | | | | | | | | |
|---|---|---|---|---|---|---|---|---|---|
| 10 | kinase | 50075_at | chromosome 1 open reading frame 28 | 22 | 96570_at | AV381276 | — | — | — |
| 10 | kinase | 50075_at | chromosome 1 open reading frame 28 | 23 | 111191_at | AW120521 | — | — | — |

| | | | | | | | | | | |
|---|---|---|---|---|---|---|---|---|---|---|
| 10 | A | 98.44% | expressed sequence C81219 Putative Ortholog | 2.5 | P | 0.833 | A | 1 | A | — |
| 10 | B | 98.44% | expressed sequence C81220 Putative Ortholog | 5.2 | A | 0.357 | A | 2.6 | A | — |

| | | | | mouse | | | | | |
|---|---|---|---|---|---|---|---|---|---|
| | | human | | | mouse | | mouse_Ref | mouse_Ref | mouse_Map |
| cat# | category | Probe ID | title | # | Probe ID | GenBank | Seq | SeqP | Location |
| 11 | matrix protein | 52576_s_at | spondin 2, extracellular matrix | | none | | | | |
| | | | protein | | | | | | |
| 12 | membrane | 44783_s_at | hairy/enhancer-of-split related | 24 | 101913_at | AW214298 | NM_010423 | NP_034553 | 3 2.4 cM |
| | protein | | with YRPW motif 1 | | | | | | |
| 12 | membrane | 44783_s_at | hairy/enhancer-of-split related | 25 | 170560_r_at | AV333303 | NM_010423 | NP_034553 | 3 2.4 cM |
| | protein | | with YRPW motif 1 | | | | | | |
| 12 | membrane | 44783_s_at | hairy/enhancer-of-split related | 26 | 161451_r_at | AV292193 | NM_010423 | NP_034553 | 3 2.4 cM |
| | protein | | with YRPW motif 1 | | | | | | |
| 12 | membrane | 44783_s_at | hairy/enhancer-of-split related | 27 | 95671_at | AJ243895 | NM_010423 | NP_034553 | 3 2.4 cM |
| | protein | | with YRPW motif 1 | | | | | | |
| 16 | oncogenesis | 46200_at | putative cytokine high in | | none | | | | |
| | | | normal-1 | | | | | | |
| 17 | others | 42055_at | hypothetical protein BC016005 | | none | | | | |
| 17 | others | 58288_at | hypothetical protein BC016005 | | none | | | | |
| 17 | others | 43849_s_at | hypothetical protein BC015359 | 28 | 94370_at | AA615075 | — | — | — |
| 17 | others | 45394_s_at | hypothetical protein BC015359 | 28 | 94370_at | AA615075 | — | — | — |
| 17 | others | 46030_at | von Ebner minor salivary gland | 29 | 160446_at | U46068 | — | AAA87581 | 2: D2Mit19n |
| | | | protein | | | | | | and |
| | | | | | | | | | D2Mit25n |
| 17 | others | 46030_at | von Ebner minor salivary gland | 30 | 171144_i_at | AV087463 | — | — | — |
| | | | protein | | | | | | |

| | mouse | | | MASM5 | | | | | | |
|---|---|---|---|---|---|---|---|---|---|---|
| | chip | homo- | | | 1 st | | 2nd | | 3 rd | |
| cat# | ID | logy | name | 1st | P/A | 2nd | P/A | 3rd | P/A | reference |
| 11 | | | | | | | | | | |
| 12 | A | 89.52% | hairy/enhancer-of-spiit related with | 1 | M | 1.3 | A | 1.2 | P | Biochem. Biophys. Res. Commun. |
| | | | YRPW motif 1 Putative Ortholog | | | | | | | 260: 459-465 (1999) |
| | | | (highly conserved) | | | | | | | |
| 12 | C | 89.52% | hairy/enhancer-of-split related with | 1.5 | P | 2.3 | P | 0.909 | A | Biochem. Biophys. Res. Commun. |
| | | | YRPW motif 1 Putative Ortholog | | | | | | | 260: 459-465 (1999) |
| | | | (highly conserved) | | | | | | | |
| 12 | A | 89.52% | hairy/enhancer-of-split related with | 0.909 | A | 1 | A | 1.1 | P | Biochem. Biophys. Res. Commun. |
| | | | YRPW motif 1 Putative Ortholog | | | | | | | 260: 459-465 (1999) |
| | | | (highly conserved) | | | | | | | |
| 12 | A | 89.52% | hairy/enhancer-of-split related with | 1 | P | 1 | P | 0.769 | P | Biochem. Biophys. Res. Commun. |
| | | | YRPW motif 1 Putative Ortholog | | | | | | | 260: 459-465 (1999) |
| | | | (highly conserved) | | | | | | | |
| 16 | | | | — | | — | | — | | |
| 17 | | | | | | | | | | |
| 17 | | | | | | | | | | |
| 17 | A | 84.62% | similar to putative, clone MGC: 37604 | 0.455 | A | 3.2 | A | 4.6 | A | — |
| | | | IMAGE: 4989150 Putative Ortholog | | | | | | | |
| 17 | A | 88.52% | ESTs, Highly similar to DIT1 MOUSE | 0.455 | A | 3.2 | A | 4.6 | A | — |
| | | | ONCOPROTEININDUCED PROTEIN 1 | | | | | | | |
| | | | [M. musculus] Putative Ortholog | | | | | | | |
| 17 | A | 84.30% | Mus musculus von Ebner minor | 1.6 | P | 3.7 | P | 3.5 | P | J. Biol. Chem. 274: 13698-13703 |
| | | | salivary gland protein mRNA, complete | | | | | | | (1999) |
| | | | cds Putative Ortholog | | | | | | | |
| 17 | C | 84.30% | Mus musculus von Ebner minor | 0.909 | A | 0.556 | A | 0.833 | A | — |
| | | | salivary gland protein mRNA, complete | | | | | | | |
| | | | cds Putative Ortholog | | | | | | | |

[0583] TABLE 78

| | | | | | | | | | |
|---|---|---|---|---|---|---|---|---|---|
| 17 | others | 46030_at | von Ebner minor salivary gland | 31 | 168955_i_at | AV092579 | — | — | — |
| | | | protein | | | | | | |
| 17 | others | 46030_at | von Ebner minor salivary gland | 32 | 169746_at | AV090196 | — | — | — |
| | | | protein | | | | | | |
| 17 | others | 49616_at | LUNX protein; PLUNC (palate lung | | — | AI845714 | NM_011126 | NP_035256 | 2 H1 |
| | | | and nasal epithelium clone); tracheal | | | | | | |
| | | | epithelium enriched protein | | | | | | |

| | | | | | | | | | | |
|---|---|---|---|---|---|---|---|---|---|---|
| 17 | C | 84.30% | Mus musculus von Ebner minor | 1.3 | A | 1.1 | A | 0.714 | A | — |
| | | | salivary gland protein mRNA, complete | | | | | | | |
| | | | cds Putative Ortholog | | | | | | | |
| 17 | C | 84.30% | Mus musculus von Ebner minor | 0.833 | A | 0.909 | A | 1.3 | A | — |
| | | | salivary gland protein mRNA, complete | | | | | | | |
| | | | cds Putative Ortholog | | | | | | | |
| 17 | — | 88.24% | palate, lung, and nasal epithelium | 1.2 | P | 1 | P | 1 | P | J. Biol. Chem. 274 (19), 13698-13703 |
| | | | expressed transcript Putative | | | | | | | (1999) |
| | | | Ortholog | | | | | | | |

| | | | | mouso | | | | | |
|---|---|---|---|---|---|---|---|---|---|
| | | human | | | mouse | | mouse_Ref | mouse_Ref | mouse_Map |
| cat# | category | Probe ID | title | # | Probe ID | GenBank | Seq | SeqP | Location |
| 20 | protein | 46271_at | FK506-binding protein 5 | 33 | 94297_at | U16959 | NM_010220 | NP_034350 | 17 13.0 cM |
| | binding | | | | | | | | |
| | protein | | | | | | | | |
| 20 | protein | 54152_at | eukaryotic translation initiation | 34 | 100636_at | U28656 | NM_007918 | NP_031944 | 8 8.0 cM |
| | binding | | factor 4E binding protein 1 | | | | | | |
| | protein | | | | | | | | |
| 25 | structural | 44730_at | collagen, type XII, alpha 1 | 35 | 92313_at | A1844066 | NM_007730 | NP_031756 | 9 43.0 cM |
| | protein | | | | | | | | |
| 25 | structural | 44730_at | collagen, type XII, alpha 1 | 36 | 92314_at | U25652 | NM_007730 | NP_031756 | 9 43.0 cM |
| | protein | | | | | | | | |
| 27 | transporter | 45826_at | solute carrier family 11 (proton- | 37 | 109059_at | AI255982 | NM_016917 | NP_058613 | 1 B |
| | | | coupled divalent metal ion | | | | | | |
| | | | transporters), member 3 | | | | | | |
| 27 | transporter | 47575_at | potassium large conductance | 38 | 97759_at | U09383 | NM_010610 | NP_034740 | 14 A3 |
| | | | calcium-activated channel, subfamily | | | | | | |
| | | | M. alpha member 1 | | | | | | |
| 27 | transporter | 53796_at | potassium large conductance | 38 | 97759_at | U09383 | NM_010610 | NP_034740 | 14 A3 |
| | | | calcium-activated channel, subfamily | | | | | | |
| | | | M. alpha member 1 | | | | | | |
| 27 | transporter | 48048_at | solute carrier family 34 (sodium | 39 | 98994_at | AF081499 | NM_011402 | NP_035532 | — |
| | | | phosphate), member 2 | | | | | | |
| 27 | transporter | 51251_at | SAC2 suppressor of actin mutations | | none | | | | |
| | | | 2-like (yeast) | | | | | | |

| | mouse | | | MASM5 | | | | | | |
|---|---|---|---|---|---|---|---|---|---|---|
| | chip | homo- | | | 1 st | | 2nd | | 3 rd | |
| cat# | ID | logy | name | 1st | P/A | 2nd | P/A | 3rd | P/A | reference |
| 20 | A | | FK506 binding protein 5 (51 kDa) | 0.244 | P | 2 | P | 4.4 | P | Mol. Cell. Biol. 15: |
| | | | Curated Ortholog | | | | | | | 4395-4402 (1995) |
| 20 | A | | eukaryotic translation initiation factor | 0.833 | P | 1.1 | P | 0.909 | P | J. Biol. Chem. 270: |
| | | | 4E binding protein 1 Curated | | | | | | | 18531-18538 (1995) |
| | | | Ortholog | | | | | | | |
| 25 | A | | procollagen, type XII, alpha 1 Curated | 0.4 | A | 2 | A | 0.526 | A | Genomics 14: 225- |
| | | | Ortholog | | | | | | | 231 (1992) |
| 25 | A | | procollagen, type XII, alpha 1 Curated | 1.2 | A | 1 | A | 1.4 | A | Genomics 14: 225- |
| | | | Ortholog | | | | | | | 231 (1992) |
| 27 | B | 92.03% | solute carrier family 39 (iron- | 1.2 | P | 0.714 | P | 0.714 | P | Mol. Cell 5: 299- |
| | | | regulated transporter), member 1 | | | | | | | 309 (2000) |
| | | | Putative Ortholog(highly conserved) | | | | | | | |
| 27 | A | | potassium large conductance | 2 | A | 2 | P | 1 | A | Science 261: 221- |
| | | | calcium-activated channel, subfamily | | | | | | | 224 (1993) |
| | | | M, alpha member 1 Curated Ortholog | | | | | | | |
| 27 | A | | potassium large conductance | 2 | A | 2 | P | 1 | A | Science 261: 221- |
| | | | calcium-activated channel, subfamily | | | | | | | 224 (1993) |
| | | | M, alpha member 1 Curatod Ortholog | | | | | | | |
| 27 | A | | solute carrier family 34 (sodium | 1.1 | P | 1.1 | P | 1 | P | Proc. Natl. Acad. |
| | | | phosphate), member 2 Curated | | | | | | | Sci. U.S.A 95: 14564- |
| | | | Ortholog | | | | | | | 14569 (1998) |
| 27 | | | | | | | | | | |

[0584] TABLE 79

| | | | | | | | |
|---|---|---|---|---|---|---|---|
| 44676_at | ESTs, Weakly similar to AF126780 1 | | none | | | | |
| | retinal short-chain | | | | | | |
| | dehydrogenase/reductase retSDR2 | | | | | | |
| | [H. sapiens] | | | | | | |
| 45684_at | ESTs | | none | | | | |
| 46709_at | sema domain, immunoglobulin domain | 40 | 94637_at | X85992 | — | CAA59984 | — |
| | (Ig), transmembrane domain (TM) | | | | | | |
| | and short cytoplasmic domain, | | | | | | |
| | (semaphorin) 4B | | | | | | |
| 47578_at | ESTs | | none | | | | |
| 48999_at | ESTs | | none | | | | |
| 49819_at | ESTs | | none | | | | |
| 49985_at | ESTs | 41 | 114451_at | AI848332 | — | — | — |
| 52384_s_at | ESTs, Weakly similar to guanine | 42 | 93178_at | AW050346 | — | — | — |
| | nucleotide regulatory protein | | | | | | |
| | [H. sapiens] | | | | | | |
| 53747_at | ESTs, Moderately similar to | | none | | | | |
| | 2109260A B cell growth factor | | | | | | |
| | [H. sapiens] | | | | | | |
| 57282_at | ESTs | | none | | | | |
| 58528_s_at | ESTs, Highly similar to fring [Homo | 43 | 96220_at | AW123157 | — | — | 11 48.0 cM |
| | sapiens] [H. sapiens] | | | | | | |
| 59109_at | ESTs | 44 | 160978_at | AW261569 | — | — | — |
| 59567_at | ESTs | | none | | | | |
| 49486_at | ESTs | 45 | 108954_at | AW060536 | NM_025980 | NP_080256 | 2 A3 |
| 49486_at | ESTs | 46 | 164706_at | AV022728 | NM_025980 | NP_080256 | 2 A3 |
| 42720_at | ESTs | | none | | | | |
| 55436_at | Homo sapiens, clone | 47 | 170083_r_at | AV338868 | — | — | — |
| | IMAGE: 4816112, mRNA | | | | | | |
| 55436_at | ESTs | 48 | 117306_at | AW120879 | — | — | — |
| 55436_at | ESTs | 49 | 170414_i_at | AV333624 | — | — | — |
| 55436_at | ESTs | 50 | 105944_at | AI844171 | — | — | — |
| 42769_at | ESTs | | none | | | | |

| | | | | | | | | | | |
|---|---|---|---|---|---|---|---|---|---|---|
| 44676_at | | | | | | | | | | |
| 45684_at | | | | — | | — | | — | | |
| 46709_at | A | 83.42% | sema domain, immunoglobulin | 1.9 | P | 1 | P | 1 | M | Neuron 14: 941- |
| | | | domain(Ig), transmembrane domain | | | | | | | 948 (1995) |
| | | | (TM) and shortcytoplasmic domain, | | | | | | | |
| | | | (semaphorin) 4B Homolog | | | | | | | |
| 47578_at | | | | — | | — | | — | | |
| 48999_at | | | | — | | — | | — | | |
| 49819_at | | | | — | | — | | — | | |
| 49985_at | B | 91.28% | ESTs Putative Ortholog (highly | 0.909 | P | 1.1 | P | 0.833 | P | — |
| | | | conserved) | | | | | | | |
| 52384_s_at | A | 93.17% | neuronal guanine nucleotide | 0.833 | A | 1 | A | 0.476 | A | — |
| | | | exchange factor Putative Ortholog | | | | | | | |
| 53747_at | | | | — | | — | | — | | |
| 57282_at | | | | — | | — | | — | | |
| 58528_s_at | A | 87.18% | DNA segment Chr 11, Wayne State | 1 | P | 1 | P | 0.833 | P | — |
| | | | University 78, expressed Putative | | | | | | | |
| | | | Ortholog (highly conserved) | | | | | | | |
| 59109_at | A | 91.35% | ESTs Putative Ortholog (highly | 2.4 | A | 0.286 | A | 0.526 | A | — |
| | | | conserved) | | | | | | | |
| 59567_at | | | | — | | — | | — | | |
| 49486_at | B | 94.80% | RIKEN cDNA 2700054M22 gene | 0.909 | P | 0.909 | P | 0.833 | A | Meth. Enzymol. 303: |
| | | | Putative Ortholog | | | | | | | 19-44 (1999) |
| 49486_at | B | 94.80% | RIKEN cDNA 2700054M22 gene | 0.625 | | 1.4 | | 1.5 | | Meth. Enzymol. 303: |
| | | | Putative Ortholog | | | | | | | 19-44 (1999) |
| 42720_at | | | | — | | — | | — | | |
| 55436_at | C | 95.58% | ESTs Putative Ortholog | 2 | P | 0.769 | A | 1.8 | A | — |
| 55436_at | B | 95.58% | ESTs Putative Ortholog | 1.4 | A | 0.833 | A | 0.909 | A | — |
| 55436_at | C | 95.58% | ESTs Putative Ortholog | 0.714 | A | 0.833 | A | 1 | A | — |
| 55436_at | B | 95.58% | ESTs Putative Ortholog | 0.476 | A | 0.833 | A | 0.833 | A | — |
| 42769_at | | | | — | | — | | — | | |

[0585] TABLE 80

| | | | | mouse | | | | | |
|---|---|---|---|---|---|---|---|---|---|
| cat | | human | | | mouse | | mouse_Ref | mouse_Ref | mouse_Map |
| # | category | Probe ID | title | # | Probe ID | GenBank | Seq | SeqP | Location |
| 3 | cell cycles | 57044_s_at | RGC32 protein | | none | | | | |
| 4 | chemokine | 65823_at | small inducible cytokine subfamily B | 1 | 96953_at | AW120786 | NM_019568 | NP_062514 | — |
| | | | (Cys-X-Cys), member 14 (BRAK) | | | | | | |
| 8 | hypothetical | 48793_at | KIAA0878 protein | 2 | 113969_at | AW208826 | — | — | — |
| | protein | | | | | | | | |
| 8 | hypothetical | 49196_at | hypothetical protein FLJ20048 | | — | B8553960 | — | — | — |
| | protein | | | | | | | | |
| 8 | hypothetical | 54791_at | hypothetical protein MGC13102 | 3 | 163461_at | AA589180 | NM_024246 | NP_077208 | 3 F1 |
| | protein | | | | | | | | |
| 8 | hypothetical | 54791_at | hypothetical protein MGC13102 | 4 | 170263_f_at | AV092570 | NM_024246 | NP_077208 | 3 F1 |
| | protein | | | | | | | | |
| 8 | hypothetical | 56234_r_at | ESTs, Weakly similar to hypothetical | | none | | | | |
| | protein | | protein FLJ20378 [Homo sapiens] | | | | | | |
| | | | [H. sapiens] | | | | | | |
| 8 | hypothetical | 60939_i_at | FLJ00189 protein | | none | | | | |
| | protein | | | | | | | | |
| 8 | hypothetical | 60940_r_at | FLJ00189 protein | | none | | | | |
| | protein | | | | | | | | |
| 8 | hypothetical | 62490_f_at | hypothetical protein FLJ10298 | 5 | 163845_i_at | AA387607 | NM_026345 | NP_080621 | 6 G1 |
| | protein | | | | | | | | |
| 8 | hypothetical | 62972_at | KIAA1376 protein | 6 | 111405_at | AI847396 | — | — | — |
| | protein | | | | | | | | |
| 8 | hypothetical | 64047_at | KIAA1376 protein | 6 | 111405_at | AI847396 | — | — | — |
| | protein | | | | | | | | |
| 8 | hypothetical | 63150_at | ESTs, Weakly similar to 138022 | | none | | | | |
| | protein | | hypothetical protein [H. sapiens] | | | | | | |
| 8 | hypothetical | 63342_at | hypothetical protein LOC51316 | 7 | 98092_at | AA790307 | NM_139198 | NP_631937 | 5 E3 |
| | protein | | | | | | | | |
| 8 | hypothetical | 64345_s_at | KIAA1102 protein | | none | | | | |
| | protein | | | | | | | | |
| 8 | hypothetical | 65626_at | Homo sapiens cDNA FLJ11041 fis, | 8 | 105858_at | AI847445 | — | — | — |
| | protein | | clone PLACE1004405 | | | | | | |
| 8 | hypothetical | 65876_at | hypothetical protein MGC16207 | | none | | | | |
| | protein | | | | | | | | |

| | mouse | | | MASM5 | | | | | | |
|---|---|---|---|---|---|---|---|---|---|---|
| cat | chip | homo- | | | 1 st | | 2nd | | 3 rd | |
| # | ID | logy | name | 1st | P/A | 2nd | P/A | 3rd | P/A | reference |
| 3 | | | | — | | — | | — | | |
| 4 | A | 94.18% | small inducible cytokine subfamily B | 1.3 | P | 0.56 | A | 0.56 | M | J. Immunol. 165: 2588-2595 |
| | | | (Cys-X-Cys), member 14 Putative | | | | | | | (2000) |
| | | | Ortholog (highly conserved) | | | | | | | |
| 8 | B | 94.02% | RIKEN cDNA 2610033K01 gene | 0.67 | P | 0.83 | A | 0.77 | P | — |
| | | | Putative Ortholog (highly conserved) | | | | | | | |
| 8 | — | 92.20% | ESTs | — | | — | | — | | — |
| 8 | B | 82.67% | RIKEN cDNA 2310042N02 gene | 1 | A | 1.3 | P | 0.39 | A | Meth. Enzymol. 303: 19-44 |
| | | | Homolog | | | | | | | (1999) |
| 8 | C | 82.67% | RIKEN cDNA 2310042N02 gene | 1.7 | M | 1.5 | A | 1 | M | Meth. Enzymol. 303: 19-44 |
| | | | Homolog | | | | | | | (1999) |
| 8 | | | | — | | — | | — | | |
| 8 | | | | — | | — | | — | | |
| 8 | | | | — | | — | | — | | |
| 8 | B | 84.64% | RIKEN cDNA 9130403P13 gene | 1 | P | 2.1 | P | 1 | P | Meth. Enzymol. 303: 19-44 |
| | | | Putative Ortholog | | | | | | | (1999) |
| 8 | B | 95.28% | ESTs Putative Ortholog (highly | 0.67 | P | 0.67 | P | 0.83 | P | — |
| | | | conserved) | | | | | | | |
| 8 | B | 95.28% | ESTs Putative Ortholog (highly | 0.67 | P | 0.67 | P | 0.83 | P | — |
| | | | conserved) | | | | | | | |
| 8 | | | | — | | — | | — | | |
| 8 | A | 85.11% | onzin Putative Ortholog | 1.8 | P | 2.2 | P | 1.6 | P | Meth. Enzymol. 303: 19-44 |
| | | | | | | | | | | (1999) |
| 8 | | | | | | | | | | |
| 8 | B | 93.80% | expressed sequence BB120430 | 0.83 | A | 1.5 | A | 0.91 | A | — |
| | | | Putative Ortholog (highly conserved) | | | | | | | |
| 8 | | | | | | | | | | |

[0586] TABLE 81

| | | | | | | | | | |
|---|---|---|---|---|---|---|---|---|---|
| 10 | kinase | 61873_at | glycerol kinase | 9 | 97525_at | U48403 | NM_008194 | NP_032220 | X 33.0 cM |
| 10 | kinase | 61873_at | glycerol kinase | 10 | 169383_r_at | AV087577 | NM_008194 | NP_032220 | X 33.0 cM |

| | | | | | | | | | | |
|---|---|---|---|---|---|---|---|---|---|---|
| 10 | A | 92.70% | glycerol kinase Putative Ortholog | 0.6 | A | 0.6 | A | 1.7 | A | Genomics 36: 530-534 (1996) |
| | | | (highly conserved) | | | | | | | |
| 10 | C | 92.70% | glycerol kinase Curated Ortholog | 1.4 | A | 1 | A | 1 | A | Genomics 36: 530-534 (1996) |

| | | | | mouse | | | | | |
|---|---|---|---|---|---|---|---|---|---|
| cat | | human | | | mouse | | mouse_Ref | mouse_Ref | mouse_Map |
| # | category | Probe ID | title | # | Probe ID | GenBank | Seq | SeqP | Location |
| 12 | membrane | 63958_at | prostate stem cell antigen | 11 | 160508_at | AW209486 | — | — | 5 53.0 cM |
| | protein | | | | | | | | |
| 17 | others | 55440_at | palate, lung and nasal epithelium | 12 | 97900_at | AI845714 | NM_011126 | NP_035256 | 2 H1 |
| | | | carcinoma associated | | | | | | |
| 17 | others | 55442_g_at | palate, lung and nasal epithelium | 12 | 97900_at | AI845714 | NM_011126 | NP_035256 | 2 H1 |
| | | | carcinoma associated | | | | | | |
| 17 | others | 63813_at | CGI-81 protein | 13 | 169613_at | AV297752 | NM_021554 | NP_067529 | 7 F1-F2 |
| 17 | others | 63813_at | CGI-81 protein | 14 | 95045_at | AI844469 | NM_021554 | NP_067529 | 7 F1-F2 |
| 25 | structural | 62998_at | keratin 6B | | — | AF312019 | — | — | — |
| | protein | | | | | | | | |
| 26 | transcription | 64071_at | papillomavirus regulatory factor | | none | | | | |
| | factor | | PRF-1 | | | | | | |
| 26 | transcription | 64121_at | glioma-amplified sequence-41 | 15 | 113151_at | AI854569 | NM_026570 | NP_080846 | 10 D2 |
| | factor | | | | | | | | |
| 26 | transcription | 64121_at | glioma-amplified sequence-41 | 16 | 171096_i_at | AV045457 | NM_028570 | NP_080846 | 10 D2 |
| | factor | | | | | | | | |
| 26 | transcription | 64121_at | glioma-amplified sequence-41 | 17 | 169003_f_at | AV121958 | NM_026570 | NP_080846 | 10 D2 |
| | factor | | | | | | | | |
| | | 64163_at | Homo sapiens clone 25194 mRNA | | none | | | | |
| | | | sequence | | | | | | |
| | | 65699_at | hypothetical protein | | none | | | | |
| | | 64285_at | ESTs | | none | | | | |

| | mouse | | | MASM5 | | | | | | |
|---|---|---|---|---|---|---|---|---|---|---|
| cat | chip | homo- | | | 1 st | | 2nd | | 3 rd | |
| # | ID | logy | name | 1st | P/A | 2nd | P/A | 3rd | P/A | reference |
| 12 | A | 80.69% | prostate stem cell antigen Curated | 1 | A | 0.7 | A | 1.3 | A | — |
| | | | Ortholog | | | | | | | |
| 17 | A | 88.24% | palate, lung, and nasal epithelium | 1.2 | P | 1 | P | 1 | P | J. Biol. Chem. 274: 13698- |
| | | | expressed transcript Curated | | | | | | | 13703 (1999) |
| | | | Ortholog | | | | | | | |
| 17 | A | 88.24% | palate, lung, and nasal epithelium | 1.2 | P | 1 | P | 1 | P | J. Biol. Chem. 274: 13698- |
| | | | expressed transcript Curated | | | | | | | 13703 (1999) |
| | | | Ortholog | | | | | | | |
| 17 | C | 98.06% | RIKEN cDNA 0610012D09 gene | 0.71 | A | 1.7 | A | 0.77 | A | Genome Res. 10: 1617-1630 |
| | | | Curated Ortholog | | | | | | | (2000) |
| 17 | A | 98.06% | RIKEN cDNA 0610012D09 gene | 1 | P | 1.3 | P | 0.91 | P | Genome Res. 10: 1617-1630 |
| | | | Curated Ortholog | | | | | | | (2000) |
| 25 | — | 89.50% | kertain complex 2, basic, pseudogene | — | | — | | — | | — |
| | | | 1 (Krt2-ps1) | | | | | | | |
| 26 | | | | | | | | | | |
| 26 | B | 89.84% | glioma-amplified sequence-41 | 1 | P | 1.2 | P | 1 | P | Meth. Enzymol. 303: 19-44 |
| | | | Homolog | | | | | | | (1999) |
| 26 | C | 89.84% | glioma-amplified sequence-41 | 2.8 | A | 1.4 | A | 0.59 | A | Meth. Enzymol. 303: 19-44 |
| | | | Homolog | | | | | | | (1999) |
| 26 | C | 89.84% | glioma-amplified sequence-41 | 1.1 | P | 1 | P | 1 | P | Meth. Enzymol. 303: 19-44 |
| | | | Homolog | | | | | | | (1999) |
| | | | | — | | — | | — | | |
| | | | | — | | — | | — | | |

[0587] TABLE 82

| | | | | mouse | | | | | |
|---|---|---|---|---|---|---|---|---|---|
| | | human | | | mouse | | mouse_Ref | mouse_Ref | mouse_Map |
| cat# | category | Probe ID | title | # | Probe ID | GenBank | Seq | SeqP | Location |
| 2 | cell adhesion | 79615_at | desmocollin 3 isoform a, b | 1 | 97655_at | Y11169 | NM_007882 | NP_031908 | 18 7.0 cM |
| 5 | cytokine | 74633_at | tumor necrosis factor, alpha- | 2 | 160489_at | L24118 | NM_009396 | NP_033422 | 12 56.0 cM |
| | related | | induced protein 2 | | | | | | |
| 7 | enzyme | 74557_s_at | 24-dehydrocholesterol | | none | | | | |
| | | | reductase | | | | | | |
| 17 | others | 82231_at | ras homolog gene family, | 3 | 133045_at | AU040173 | — | — | — |
| | | | member V | | | | | | |
| 22 | proteinase | 75248_at | serine (or cysteine) proteinase | 4 | 103611_at | AB012693 | NM_010581 | NP_034711 | 16 B5 |
| | inhibitor | | inhibitor, clade A (alpha-1 | | | | | | |
| | | | antiproteinase, antitrypsin), | | | | | | |
| | | | member 3 | | | | | | |
| | | 69289_at | Homo sapiens cDNA FLJ12289 | 5 | 94780_at | AI987985 | — | — | — |
| | | | fis, clone MAMMA1001788 | | | | | | |
| | | 69289_at | | 6 | 136442_at | AI593316 | — | — | — |
| | | 70124_at | ESTs | | none | | | | |
| | | 72604_at | ESTs | | none | | | | |
| | | 79520_at | ESTs | | none | | | | |
| | | 83076_at | ESTs | | none | | | | |
| | | 83988_at | ESTs | | none | | | | |
| | | 84270_at | ESTs, Weakly similar to | 7 | 130772_at | AI838844 | NM_011838 | NP_035968 | 15 D3 |
| | | | E48A_HUMAN E48 ANTIGEN | | | | | | |
| | | | PRECURSOR [H. sapiens] | | | | | | |
| | | 84270_at | ESTs, Weakly similar to | 8 | 137205_f_at | AI839851 | NM_011838 | NP_035968 | 15 D3 |
| | | | E48A_HUMAN E48 ANTIGEN | | | | | | |
| | | | PRECURSOR [H. sapiens] | | | | | | |
| | | 84903_f_at | ESTs | | none | | | | |
| | | 87539_i_at | ESTs | | none | | | | |
| | | 68339_at | clone = IMAGE-2229660 | | none | | | | |

| | mouse | | | MASM5 | | | | | | |
|---|---|---|---|---|---|---|---|---|---|---|
| | chip | homo- | | | 1 st | | 2nd | | 3 rd | |
| cat# | ID | logy | name | 1st | P/A | 2nd | P/A | 3rd | P/A | reference |
| 2 | A | 87.58% | desmocollin 3 Curated Ortholog | 0.3 | A | 0.8 | A | 1.2 | A | Dev. Dyn. 210: 315-327 |
| | | | | | | | | | | (1997) |
| 5 | A | 83.79% | tumor necrosis factor, alpha-induced | 0.6 | A | 0.7 | A | 0.6 | A | J. Biol. Chem. 269: 3633- |
| | | | protein 2 Curated Ortholog | | | | | | | 3640 (1994) |
| 7 | | | | — | | — | | — | | |
| 17 | C | 90.77% | clone MGC: 29297 IMAGE: 5003249, | 0.3 | A | 0.3 | A | 0.4 | A | — |
| | | | Putative Ortholog | | | | | | | |
| 22 | A | 89.81% | integrin-associated protein Putative | 1 | P | 1 | P | 1 | P | J. Cell Biol. 123: 485-496 |
| | | | Ortholog | | | | | | | (1993) |
| | A | 86.36% | DNA segment, Chr 16, Wayne State | 0.7 | P | 0.6 | P | 1 | P | — |
| | | | University 73, expressed Putative | | | | | | | |
| | | | Ortholog | | | | | | | |
| | C | 86.36% | DNA segment, Chr 16, Wayne State | 0.7 | A | 1 | A | 1.5 | A | — |
| | | | University 73, expressed Putative | | | | | | | |
| | | | Ortholog | | | | | | | |
| | | | | — | | — | | — | | |
| | | | | — | | — | | — | | |
| | | | | — | | — | | — | | |
| | | | | — | | — | | — | | |
| | | | | — | | — | | — | | |
| | C | 85.84% | Ly6/neurotoxin 1 Putative Ortholog | 0.8 | P | 1.1 | A | 0.9 | A | Neuron 22: - (1999) |
| | C | 85.84% | Ly6/neurotoxin 1 Putative Ortholog | 0.2 | A | 0.4 | A | 0.7 | A | Neuron 22: - (1999) |
| | | | | — | | — | | — | | |
| | | | | — | | — | | — | | |
| | | | | — | | — | | — | | |

[0588] TABLE 83

| | | | | mouse | | | | | |
|---|---|---|---|---|---|---|---|---|---|
| cat | | human | | | mouse | | mouse_Ref | mouse_Ref | mouse_Map |
| # | category | Probe ID | title | # | Probe ID | GenBank | Seq | SeqP | Location |
| 1 | apoptosis | 80667_f_at | lectin, galactoside-binding, soluble, 1 | 1 | 99669_at | X15986 | NM_008495 | NP_032521 | 15 44.9 cM |
| | | | (galectin 1) | | | | | | |
| 2 | cell adhesion | 88239_i_at | contactin 1 | 2 | 92936_at | X14943 | NM_007727 | NP_031753 | 15 55.1 cM |
| 2 | cell adhesion | 88239_i_at | | 3 | 164059_f_at | X14943 | NM_007727 | NP_031753 | 15 55.1 cM |
| 2 | cell adhesion | 88239_i_at | | 4 | 105826_at | AI843096 | NM_007727 | NP_031753 | 15 55.1 cM |
| 2 | cell adhesion | 88239_i_at | | 5 | 170177_r_at | AV331012 | NM_007727 | NP_031753 | 15 55.1 cM |
| 7 | enzyme | 81926_at | peptidylarginine deiminase type 1 | 6 | 95343_at | AB013848 | NM_011059 | NP_035189 | 4 |
| 7 | enzyme | 81926_at | peptidylarginine deiminase type 1 | 7 | 103803_at | AB013849 | NM_011060 | NP_035190 | 4 |
| 7 | enzyme | 89741_at | GalNAc alpha-2,6-sialyrtransferase | | none | | | | |
| | | | 1, long form | | | | | | |
| 8 | hypothetical | 69750_at | hypothetical protein FLJ10718 | | none | | | | |
| | protein | | | | | | | | |
| 8 | hypothetical | 77516_r_at | prominin-related protein mRNA, | | none | | | | |
| | protein | | variant B, complete cds, alternatively | | | | | | |
| | | | spliced | | | | | | |
| e | hypothetical | 86024_at | hypothetical protein MGC14128 | | none | | | | |
| | protein | | | | | | | | |
| 8 | hypothetical | 89360_at | hypothetical protein MGC14128 | | none | | | | |
| | protein | | | | | | | | |
| 27 | transporter | 91275_at | aquaporin 5 | 8 | 113916_at | AI182792 | NM_009701 | NP_033831 | 15 56.8 cM |
| | | 76769_at | ESTs | | — | AF184981 | NM_018881 | NP_061369 | 1 H1 |
| | | 88716_at | Homo sapiens cDNA FLJ12231 fis, | | none | | | | |
| | | | clone MAMMA1001191 | | | | | | |

| | mouse | | | MASM5 | | | | | | |
|---|---|---|---|---|---|---|---|---|---|---|
| cat | chip | homo- | | | 1 st | | 2nd | | 3 rd | |
| # | ID | logy | name | 1st | P/A | 2nd | P/A | 3rd | P/A | reference |
| 1 | A | | lectin, galactose binding, soluble 1 | 1.6 | A | 2 | A | 1.3 | A | Cancer Res. 48: 645-649(1988) |
| | | | Curated Ortholog | | | | | | | |
| 2 | A | 86.25% | contactin 1 Putative Ortholog (highly | 1.3 | M | 1.9 | P | 0.44 | P | J. Cell Biol. 109: 775-788(1989) |
| | | | conserved) | | | | | | | |
| 2 | B | 86.25% | contactin 1 Curated Ortholog | 1.7 | P | 0.91 | A | 0.77 | A | J. Cell Biol. 109: 775-788(1989) |
| 2 | B | 86.25% | contactin 1 Curated Ortholog | 0.83 | A | 1 | A | 1.1 | A | J. Cell Biol. 109: 775-788(1989) |
| 2 | C | 86.25% | contectin 1 Curated Ortholog | 0.67 | A | 1.1 | A | 1.5 | A | J. Cell Biol. 109: 775-788(1989) |
| 7 | A | | peptidyl arginine deiminase, type I | 1.3 | A | 0.83 | A | 0.67 | A | Eur. J. Biochem. 259: 660-669 |
| | | | Curated Ortholog | | | | | | | (1999) |
| 7 | A | 87.80% | peptidyl arginine deiminase, type III | 2.2 | A | 1.4 | A | 1.5 | A | Eur. J. Biochem. 259: 660-669 |
| | | | Putative Ortholog | | | | | | | (1999) |
| 7 | | | | | | | | | | |
| 8 | | | | | | | | | | |
| 8 | | | | — | | — | | — | | |
| 8 | | | | — | | — | | — | | |
| 8 | | | | — | | — | | — | | |
| 27 | B | | aquaporin 5 Curated Ortholog | 0.77 | P | 0.83 | P | 0.59 | P | Mamm. Genome 10: 498-505 (1999) |
| | — | 0.85 | flavin-containing monooxygenase 2 | — | | — | | — | | Genome Res. 10 (10), 1617-1630 |
| | | | | | | | | | | (2000) |

[0589] In addition, the nucleotide sequences and the amino acid sequences of the mouse counterparts are shown in SEQ ID NOs: 954 to 1635. The details are as follows.

The mouse counterparts of the human genes whose expression levels were increased by IL-13 (AI method):

[0590] 954 to 1174 (nucleotide sequence)
[0591] 1175 to 1375 (amino acid sequence)
   The mouse counterparts of the human genes whose expression levels were decreased by IL-13 (IMM method):
[0592] 1376 to 1505 (nucleotide sequence)
[0593] 1506 to 1635 (amino acid sequence)

[0594] With respect to each mouse counterpart, Probe ID, GenBank Accession No., Ref SEQ NO, and the corresponding SEQ ID NO in the Sequence Listing are shown in Tables 84 to 113.

TABLE 84

| | mouse | | | | | |
|---|---|---|---|---|---|---|
| | mouse | | mouse_Ref | Mouse_Ref | SEQ ID NO: | SEQ ID NO: |
| cat# | Probe ID | GenBank | Seq | SeqP | (nucleotide seq.) | (amino acid seq.) |
| 2 | 160469_at | M62470 | NM_011580 | NP_035710 | 954 | 1376 |
| 2 | 92593_at | D13664 | NM_015784 | NP_056599 | 955 | 1377 |
| 2 | 101730_at | D82029 | NM_007666 | NP_031692 | 956 | 1378 |
| 2 | 101141_at | M33036 | — | — | 957 | 1379 |
| 2 | 96752_at | M90551 | — | — | 957 | 1379 |
| 2 | none | | | | | |
| 2 | 105606_at | AW210072 | NM_028810 | NP_083086 | 958 | 1380 |
| 2 | 163053_at | AA716925 | NM_028810 | NP_083086 | 958 | 1380 |
| 3 | 160545_at | M86183 | NM_007632 | NP_031658 | 959 | 1381 |
| 3 | 160545_at | M86183 | NM_007632 | NP_031658 | 959 | 1381 |
| 4 | 140659_at | AA174767 | NM_019494 | NP_062367 | 960 | 1382 |
| 4 | 93858_at | M33266 | NM_021274 | NP_067249 | 961 | 1383 |
| 5 | 95344_at | U65747 | NM_008356 | NP_032382 | 962 | 1384 |
| 5 | 93300_at | X57413 | NM_009367 | NP_033393 | 963 | 1385 |
| 6 | 97261_at | AF055664 | NM_008298 | NP_032324 | 964 | 1386 |
| 6 | 101979_at | AF055638 | NM_011817 | NP_035947 | 965 | 1387 |
| 6 | 109336_at | AI035425 | NM_011817 | NP_035947 | 965 | 1387 |
| 7 | 104420_at | U43428 | NM_010927 | NP_035057 | 966 | 1388 |
| 7 | 107939_at | AI021374 | — | — | 967 | — |
| 7 | none | | | | | |
| 7 | 114376_at | AW259579 | NM_011961 | NP_036091 | 968 | 1389 |
| 7 | 92634_at | U12620 | NM_010074 | NP_034204 | 969 | 1390 |
| 7 | 96918_at | AI790931 | NM_019395 | NP_062268 | 970 | 1391 |
| 7 | 165678_i_at | AI482191 | — | — | 971 | — |
| 7 | — | X69657 | NM_011710 | NP_035840 | 972 | 1392 |
| 7 | 169670_at | AV028295 | NM_008290 | NP_032316 | 973 | 1393 |

[0595] TABLE 85

| | | | | | | |
|---|---|---|---|---|---|---|
| 7 | 166141_i_at | AV224027 | NM_008290 | NP_032316 | 973 | 1393 |
| 7 | 101891_at | Y09517 | NM_008290 | NP_032316 | 973 | 1393 |
| 7 | 111949_at | AI853171 | — | — | 974 | — |
| 7 | 93085_at | D44456 | NM_013585 | NP_038613 | 975 | 1394 |
| 7 | 102717_at | X58077 | — | — | 976 | 1395 |
| 7 | 102717_at | X58077 | — | — | 976 | 1395 |
| 7 | 93352_at | M55154 | NM_009373 | NP_033399 | 977 | 1396 |
| 7 | none | | | | | |
| 7 | 161043_r_at | AV277568 | NM_015762 | NP_056577 | 978 | 1397 |
| 7 | 99985_at | AB027565 | NM_015762 | NP_056577 | 978 | 1397 |
| 7 | 161284_r_at | AV299386 | MM_015762 | NP_056577 | 978 | 1397 |
| 7 | 162642_at | AI854834 | NM_015762 | NP_056577 | 978 | 1397 |
| 7 | — | AF159230 | NM_019949 | NP_064333 | 979 | 1398 |
| 7 | 94431_at | D16106 | NM_009175 | NP_033201 | 980 | 1399 |
| 7 | 167200_r_at | AV024481 | NM_009175 | NP_033201 | 980 | 1399 |
| 7 | 102410_at | AF019385 | NM_010474 | NP_034604 | 981 | 1400 |

| | mouse | | | | | |
|---|---|---|---|---|---|---|
| | mouse | | mouse_Ref | mouse_Ref | SEQ ID NO: | SEQ ID NO: |
| cat# | Probe ID | GenBank | Seq | SeqP | (nucleotide seq.) | (amino acid seq.) |
| 8 | 110469_at | AI844322 | — | — | 982 | — |
| 8 | 109915_at | AA170781 | NM_018851 | NP_061339 | 983 | 1401 |
| 8 | 103080_at | U15635 | NM_018851 | NP_061339 | 983 | 1401 |
| 8 | 166590_at | AV245197 | — | — | 984 | — |
| 8 | — | AK020957 | — | — | 985 | — |
| 8 | — | BF321302 | — | — | 986 | — |
| 8 | — | none | — | — | | |
| 8 | — | none | — | — | | |
| 9 | 98822_at | X56602 | NM_015783 | NP_056598 | 987 | 1402 |
| 9 | 98822_at | X56602 | NM_015783 | NP_056598 | 987 | 1402 |
| 9 | 100981_at | U43084 | NM_008331 | NP_032357 | 988 | 1403 |
| 9 | 168299_f_at | AV090198 | NM_008331 | NP_032357 | 988 | 1403 |
| 9 | 100981_at | U43084 | NM_008331 | NP_032357 | 988 | 1403 |
| 9 | 168299_f_at | AV090198 | NM_008331 | NP_032357 | 988 | 1403 |
| 9 | 103432_at | AW122677 | NM_020583 | NP_065608 | 989 | 1404 |
| 9 | 109385_at | AI315194 | NM_021384 | NP_067359 | 990 | 1405 |
| 9 | none | | | | | |
| 9 | 98501_at | Y07519 | NM_010743 | NP_034873 | 991 | 1406 |
| 9 | 98500_at | D13695 | NM_010743 | NP_034873 | 991 | 1406 |
| 9 | none | | | | | |

[0596] TABLE 86

| | | | | | | |
|---|---|---|---|---|---|---|
| 9 | — | AW986054 | — | — | 992 | — |
| 9 | — | AW986054 | — | — | 992 | — |
| 9 | — | AK003407 | — | BAB22771 | 993 | 1407 |
| 9 | none | | | | | |
| 9 | none | | | | | |
| 9 | 97444_at | AI844520 | NM_023065 | NP_075552 | 994 | 1408 |
| 9 | 164423_at | AV076807 | NM_023065 | NP_075552 | 994 | 1408 |
| 9 | 164273_at | AV276912 | — | — | 995 | — |

| | mouse | | | | | |
|---|---|---|---|---|---|---|
| | mouse | | mouse_Ref | mouse_Ref | SEQ ID NO: | SEQ ID NO: |
| cat# | Probe ID | GenBank | Seq | SeqP | (nucleotide seq.) | (amino acid seq.) |
| 10 | 97823_g_at | AW122689 | — | — | 996 | — |
| 10 | 97822_at | AW122689 | — | — | 996 | — |
| 10 | 97821_at | AI646056 | — | — | 997 | — |
| 10 | 101435_at | AF033275 | NM_009649 | NP_033779 | 998 | 1409 |
| 10 | 163162_at | AI060985 | NM_019921 | NP_064305 | 999 | 1410 |
| 10 | 110116_at | AW124632 | — | — | 1000 | — |
| 10 | 100951_at | AF014010 | NM_008861 | NP_032887 | 1001 | 1411 |
| 10 | 99136_at | X63535 | NM_009465 | NP_033491 | 1002 | 1412 |
| 12 | — | — | NM_008591 | NP_032617 | 1003 | 1413 |
| 12 | — | — | NM_008591 | NP_032617 | 1003 | 1413 |
| 12 | 100309_at | Y00671 | NM_008591 | NP_032617 | 1003 | 1413 |
| 12 | 96935_at | AW011791 | NM_026018 | NP_080294 | 1004 | 1414 |
| 12 | 162531_at | AW048375 | — | — | 1005 | — |
| 12 | 101410_at | AB000713 | NM_009903 | NP_034033 | 1006 | 1415 |
| 12 | 100086_at | D00622 | — | BAA00500 | 1007 | — |
| 12 | 161988_f_at | AV234541 | — | — | 1008 | — |
| 12 | none | | | | | |
| 12 | 104516_at | U82758 | NM_013805 | NP_038833 | 1009 | 1416 |
| 12 | — | AY013776 | NM_053140 | NP_444370 | 1010 | 1417 |
| 12 | 103617_at | D63679 | NM_010016 | NP_034146 | 1011 | 1418 |
| 12 | 164905_r_at | AV358386 | NM_010016 | NP_034146 | 1011 | 1418 |
| 12 | 107626_at | AA174516 | NM_010016 | NP_034146 | 1011 | 1418 |
| 12 | 115133_at | AI875165 | NM_021401, | NP_067376, | 1012, 1013 | 1419, 1420 |
| | | | NM_026907 | NP_081183 | | |
| 13 | 104509_at | AF059213 | NM_009890 | NP_034020 | 1014 | 1421 |
| 13 | 133666_at | AI450812 | NM_009890 | NP_034020 | 1014 | 1421 |

[0597] TABLE 87

| | | | | | | |
|---|---|---|---|---|---|---|
| 13 | 98758_at | L34570 | NM_009660 | NP_033790 | 1015 | 1422 |
| 13 | 102696_s_at | AI747899 | NM_019640 | NP_062614 | 1016 | 1423 |
| 13 | 102696_s_at | AI747899 | NM_019640 | NP_062614 | 1016 | 1423 |
| 13 | 102697_at | U46934 | NM_019640 | NP_062614 | 1016 | 1423 |

| | mouse | | | | | |
|---|---|---|---|---|---|---|
| | mouse | | mouse_Ref | mouse_Ref | SEQ ID NO: | SEQ ID NO: |
| cat# | Probe ID | GenBank | Seq | SeqP | (nucleotide seq.) | (amino acid seq.) |
| 14 | 101433_at | AF010452 | NM_008209 | NP_032235 | 1017 | 1424 |
| 14 | none | | | | | |
| 14 | 98438_f_at | X16202 | NM_010394 | NP_034524 | 1018 | 1425 |
| 14 | 98438_f_at | X16202 | NM_010394 | NP_034524 | 1018 | 1425 |
| 15 | none | | | | | |
| 15 | 101723_r_at | U06146 | — | AAA18425 | 1019 | 1426 |
| 15 | 103024_at | X13335 | NM_007403 | NP_031429 | 1020 | 1427 |
| 15 | 92917_at | L36244 | NM_010810 | NP_034940 | 1021 | 1428 |
| 15 | 114151_at | AI426250 | NM_010810 | NP_034940 | 1021 | 1428 |
| 15 | 162318_r_at | AV069212 | NM_010810 | NP_034940 | 1021 | 1428 |
| 16 | 166806_at | AI835337 | NM_019967 | NP_064351 | 1022 | 1429 |
| 17 | 112883_at | AI835478 | — | — | 1023 | — |
| 17 | 100567_at | M20497 | NM_024406 | NP_077717 | 1024 | 1430 |
| 17 | 97912_at | AI843488 | NM_019793 | NP_062767 | 1025 | 1431 |
| 17 | 101429_at | X67083 | NM_007837 | NP_031863 | 1026 | 1432 |
| 17 | 97647_at | M11408 | NM_013647 | NP_038675 | 1027 | 1433 |
| 17 | 169860_r_at | M11408 | NM_013647 | NP_038675 | 1027 | 1433 |
| 17 | 169362_f_at | AV069368 | NM_023137 | NP_075626 | 1028 | 1434 |
| 17 | 92715_at | AV069368 | NM_023137 | NP_075626 | 1028 | 1434 |
| 17 | 168938_r_at | AV069368 | NM_023137 | NP_075626 | 1028 | 1434 |
| 17 | 112237_at | AI115916 | NM_026228 | NP_080504 | 1029 | 1435 |
| 17 | 97442_at | AI115916 | NM_026228 | NP_080504 | 1029 | 1435 |
| 27 | 110839_at | AI839647 | — | — | | |
| 19 | 162702_at | AI851272 | NM_019819 | NP_062793 | 1030 | 1436 |

[0598] TABLE 88

| | | | | | | |
|---|---|---|---|---|---|---|
| 19 | 165144_r_at | AV357704 | NM_019819 | NP_062793 | 1030 | 1436 |
| 19 | 171285_at | AV216631 | NM_019819 | NP_062793 | 1030 | 1436 |
| 19 | 162543_r_at | AV248962 | NM_007388 | NP_031414 | 1031 | 1437 |
| 19 | 98859_at | M99054 | NM_007388 | NP_031414 | 1031 | 1437 |

| | mouse | | | | | |
|---|---|---|---|---|---|---|
| | mouse | | mouse_Ref | mouse_Ref | SEQ ID NO: | SEQ ID NO: |
| cat# | Probe ID | GenBank | Seq | SeqP | (nucleotide seq.) | (nucleotide seq.) |
| 20 | 92832_at | U88325 | NM_009896 | NP_034026 | 1032 | 1438 |
| 21 | 101019_at | U74683 | NM_009982 | NP_034112 | 1033 | 1439 |
| 21 | 161251_f_at | AV316954 | NM_009982 | NP_034112 | 1033 | 1439 |
| 21 | 101020_at | AI842667 | NM_009982 | NP_034112 | 1033 | 1439 |
| 21 | none | | | | | |
| 21 | — | AA798057 | — | — | 1034 | — |
| 21 | 93303_at | U64445 | NM_011672 | NP_035802 | 1035 | 1440 |
| 22 | — | AF063937 | NM_009126 | NP_033152 | 1036 | 1441 |
| 22 | 108524_at | U64445 | NM_011672 | NP_035802 | 1037 | 1442 |
| 22 | 108524_at | U64445 | NM_011672 | NP_035802 | 1037 | 1442 |
| 22 | 96060_at | U25844 | NM_009254 | NP_033280 | 1038 | 1443 |
| 22 | 113899_at | AW121899 | NM_007840 | NP_031866 | 1039 | 1444 |
| 22 | 93493_at | X65827 | NM_007840 | NP_031866 | 1039 | 1444 |
| 22 | 137166_r_at | AI327311 | NM_011111 | NP_035241 | 1040 | 1445 |
| 22 | 92978_s_at | X16490 | NM_011111 | NP_035241 | 1040 | 1445 |
| 24 | 163453_at | AI596769 | — | — | 1041 | — |
| 24 | 166475_r_at | AV146353 | — | — | 1042 | — |
| 24 | 98307_at | AF106070 | NM_011246 | NP_035376 | 1043 | 1446 |
| 24 | 167498_i_at | AV313063 | NM_011246 | NP_035376 | 1043 | 1446 |
| 24 | 98417_at | M21038 | NM_010846 | NP_034976 | 1044 | 1447 |
| 24 | 103611_at | AB012693 | NM_010581 | NP_034711 | 1045 | 1448 |
| 24 | 102699_at | J03368 | NM_013606 | NP_038634 | 1046 | 1449 |
| 24 | 98417_at | M21038 | NM_010846 | NP_034976 | 1044 | 1447 |
| 25 | — | AI427122 | — | — | 1047 | — |

[0599] TABLE 89

| | | | | | | |
|---|---|---|---|---|---|---|
| 25 | 164428_i_at | AV085754 | NM_008470 | NP_032496 | 1048 | 1450 |
| 25 | 103589_at | AF053235 | NM_008470 | NP_032496 | 1048 | 1450 |

| | mouse | | | | | |
|---|---|---|---|---|---|---|
| | mouse | | mouse_Ref | mouse_Ref | SEQ ID NO: | SEQ ID NO: |
| cat# | Probe ID | GenBank | Seq | SeqP | (nucleotide seq.) | (amino acid seq.) |
| 26 | 101465_at | U06924 | NM_009283 | NP_033309 | 1049 | 1451 |
| 26 | 114635_at | AA960121 | NM_009283 | NP_033309 | 1049 | 1451 |
| 26 | 101465_at | U06924 | NM_009283 | NP_033309 | 1049 | 1451 |
| 26 | 114635_at | AA960121 | NM_009283 | NP_033309 | 1049 | 1451 |
| 26 | 101465_at | U06924 | NM_009283 | NP_033309 | 1049 | 1451 |
| 26 | 101465_at | U06924 | NM_009283 | NP_033309 | 1049 | 1451 |
| 26 | 93281_at | AF049125 | NM_011992 | NP_036122 | 1050 | 1452 |
| 26 | 109154_at | AW121894 | — | — | 1051 | — |
| 26 | — | AK005232 | NM_027213 | NP_081489 | 1052 | 1453 |
| 26 | — | U73037 | NM_016850 | NP_058546 | 1053 | 1454 |
| 26 | 164758_i_at | AV222614 | NM_017373 | NP_059069 | 1054 | 1455 |
| 27 | — | AF167411 | NM_011867 | NP_035997 | 1055 | 1456 |
| 27 | 102326_at | AB002664 | NM_010877 | NP_035007 | 1056 | 1457 |
| 27 | 110839_at | AI839647 | — | — | 1057 | — |

[0600] TABLE 90

| | mouse | | | | | |
|---|---|---|---|---|---|---|
| | mouse | | mouse_Ref | mouse_Ref | SEQ ID NO: | SEQ ID NO: |
| cat# | Probe ID | GenBank | Seq | SeqP | (nucleotide seq.) | (amino acid seq.) |
| 2 | none | | | | | |
| 2 | 101730_at | D82029 | NM_007666 | P_031692 | 1058 | 1458 |
| 4 | 160596_at | AW050048 | NM_025397 | NP_079673 | 1059 | 1459 |
| 4 | 163760_at | AW122516 | NM_023158 | NP_075647 | 1060 | 1460 |
| 4 | 134771_at | A1606877 | NM_023158 | NP_075647 | 1060 | 1460 |
| 4 | 165377_r_at | AV062836 | NM_023158 | NP_075647 | 1060 | 1460 |
| 5 | none | | | | | |
| 6 | 103471_at | AI194333 | NM_025706 | NP_079982 | 1061 | 1461 |
| 6 | 101955_at | AJ002387 | NM_022310 | NP_071705 | 1062 | 1462 |
| 6 | 162445_at | AV351546 | NM_022310 | NP_071705 | 1062 | 1462 |
| 7 | 167028_at | AI841650 | NM_021890 | NP_068690 | 1063 | 1463 |
| 7 | 168721_r_at | AV235789 | NM_021890 | NP_068690 | 1063 | 1463 |
| 7 | 104420_at | U43428 | NM_010927 | NP_035057 | 1064 | 1464 |
| 7 | 103446_at | AAA959954 | NM_027835 | NP_082111 | 1065 | 1465 |
| 7 | 99394_at | U86408 | NM_008217 | NP_032243 | 1066 | 1466 |
| 7 | 108048_at | AI836268 | — | — | 1067 | — |
| 7 | none | | | | | |
| 7 | 110639_at | AW108146 | — | — | 1068 | — |
| 8 | 107112_at | AI121797 | — | — | 1069 | — |
| 8 | 107112_at | AI121797 | — | — | 1069 | — |
| 8 | 116662_at | AI843057 | — | — | 1070 | — |
| 8 | 163364_at | AA472475 | — | — | 1071 | — |
| 8 | 168478_s_at | AV366153 | — | — | 1072 | — |
| 8 | — | BE687722 | — | — | 1073 | — |
| 8 | none | | | | | |
| 8 | — | AK020110 | NM_029999 | NP_084275 | 1074 | 1467 |
| 8 | 113253_r_at | AI852111 | — | — | 1075 | — |

[0601] TABLE 91

| | | | | | | |
|---|---|---|---|---|---|---|
| 8 | 170461_i_at | AV209883 | — | — | 1076 | — |
| 8 | 115732_at | AI530075 | — | — | 1077 | — |
| 14 | none | | | | | |
| 8 | 106644_at | AW047110 | NM_009370 | NP_033396 | 1078 | — |
| 8 | 92427_at | D25540 | NM_009370 | NP_033396 | 1078 | — |
| 8 | none | | | | | |
| 8 | none | | | | | |
| 8 | none | | | | | |
| 8 | 106644_at | AW047110 | NM_009370 | NP_033396 | 1078 | 1468 |
| 8 | 92427_at | D25540 | NM_009370 | NP_033396 | 1078 | 1468 |
| 8 | 102907_at | AW125043 | — | — | 1079 | — |
| 8 | 106644_at | AW047110 | NM_009370 | NP_033396 | 1078 | — |
| 8 | 92427_at | D25540 | NM_009370 | NP_033396 | 1078 | — |
| 8 | none | | | | | |
| 8 | 114794_at | AA693185 | — | — | 1080 | — |
| 8 | none | | | | | |
| 8 | 92971_at | AW125849 | — | — | 1081 | — |
| 8 | 102907_at | AW125043 | — | — | 1079 | — |
| 8 | 114119_at | AW124823 | — | — | 1082 | — |
| 8 | 112671_at | AW122101 | — | — | 1083 | — |
| 8 | 112671_at | AW122101 | — | — | 1083 | — |
| 8 | none | | | | | |
| 8 | none | | | | | |
| 8 | none | | | | | |

| | mouse | | | | | |
|---|---|---|---|---|---|---|
| | mouse | | mouse_Ref | mouse_Ref | SEQ ID NO: | SEQ ID NO: |
| cat# | Probe ID | GenBank | Seq | SeqP | (nucleotide seq.) | (amino acid seq.) |
| 9 | none | | | | | |
| 9 | 95974_at | M55544 | NM_010259 | NP_034389 | 1084 | 1469 |
| 10 | 101435_at | AF033275 | NM_009649 | NP_033779 | 1085 | 1470 |
| 10 | AA060013 | — | — | — | 1086 | — |
| 10 | 103839_at | AF064748 | NM_011451 | NP_035581 | 1087 | 1471 |
| 10 | 164777_i_at | AV250525 | NM_011451 | NP_035581 | 1087 | 1471 |
| 10 | 162448_f_at | AV354094 | NM_030704 | NP_109629 | 1088 | 1472 |
| 10 | 160139_at | AI848798 | NM_030704 | NP_109629 | 1088 | 1472 |
| 12 | 160415_at | AI604314 | NM_016674 | NP_057883 | 1089 | 1473 |
| 12 | 97546_at | AF072127 | NM_016674 | NP_057883 | 1089 | 1473 |
| 12 | 99934_at | M80206 | NM_008990 | NP_033016 | 1090 | 1474 |
| 12 | 164850_f_at | AV369774 | NM_008990 | NP_033016 | 1090 | 1474 |

[0602] TABLE 92

| | | | | | | |
|---|---|---|---|---|---|---|
| 12 | 99933_at | D26107 | NM_008990 | NP_033016 | 1090 | 1474 |
| 12 | 108811_at | AA981032 | — | — | 1091 | — |
| 12 | 170500_at | AV223427 | — | — | 1092 | — |

| | mouse | | | | | |
|---|---|---|---|---|---|---|
| | mouse | | mouse_Ref | mouse_Ref | SEQ ID NO: | SEQ ID NO: |
| cat# | Probe ID | GenBank | Seq | SeqP | (nucleotide seq.) | (amino acid seq.) |
| 16 | 163337_at | AA727483 | — | — | 1093 | — |
| 16 | 109021_at | AW214142 | NM_030253 | NP_084529 | 1094 | 1475 |
| 17 | 109915_at | AA170781 | NM_018851 | NP_061339 | 1095 | 1476 |
| 17 | 103080_at | U15635 | NM_018851 | NP_061339 | 1095 | 1476 |
| 17 | AW742692 | — | — | — | 1096 | — |
| 17 | 166458_at | AI431004 | NM_025872 | NP_080148 | 1097 | 1477 |
| 17 | 107906_at | AI316570 | NM_025872 | NP_080148 | 1097 | 1477 |
| 17 | 165304_at | AV245062 | NM_138741 | NP_620080 | 1098 | 1478 |
| 17 | 160373_i_at | AI839175 | NM_138741 | NP_620080 | 1098 | 1478 |
| 17 | 111260_at | AI843809 | — | — | 1099 | — |
| 17 | 166340_at | AA793651 | — | — | 1100 | — |
| 17 | 165319_at | AV270997 | NM_016736 | NP_058016 | 1101 | 1479 |
| 17 | 168781_at | AV258801 | NM_020622 | NP_065647 | 1102 | 1480 |
| 17 | 161580_f_at | AV314820 | NM_016736 | NP_058016 | 1101 | 1479 |
| 17 | 100570_at | U27462 | NM_016736 | NP_058016 | 1101 | 1479 |
| 17 | none | | | | | |
| 18 | 104550_at | AW123273 | NM_028775 | NP_083051 | 1103 | 1481 |
| 20 | 92832_at | U88325 | MM_009896 | NP_034026 | 1104 | 1482 |
| 20 | 93281_at | AF049125 | NM_011992 | NP_036122 | 1105 | 1483 |
| 21 | 95024_at | AW047653 | NM_011909 | NP_036039 | 1106 | 1484 |
| 24 | 162383_r_at | AV248632 | NM_009895 | NP_034025 | 1107 | 1485 |
| 24 | 100022_at | D89613 | NM_009895 | NP_034025 | 1107 | 1485 |
| 24 | 115396_at | AW212285 | NM_020578 | NP_065603 | 1108 | 1486 |

[0603] TABLE 93

| | | | | | | |
|---|---|---|---|---|---|---|
| 24 | 163326_i_at | AI616268 | NM_027178 | NP_081454 | 1109 | 1487 |

| | mouse | | | | | |
|---|---|---|---|---|---|---|
| | mouse | | mouse_Ref | mouse_Ref | SEQ ID NO: | SEQ ID NO: |
| cat# | Probe ID | GenBank | Seq | SeqP | (nucleotide seq.) | (amino acid seq.) |
| 25 | 163157_at | AI606261 | NM_033373 | NP_203537 | 1110 | 1488 |
| 26 | — | — | NM_016850 | NP_058546 | 1111 | 1489 |
| 26 | 161185_i_at | AV235936 | NM_010637 | NP_034767 | 1112 | 1490 |
| 26 | 99622_at | U20344 | NM_010637 | NP_034767 | 1112 | 1490 |
| | none | | | | | |
| | none | | | | | |
| | none | | | | | |
| | 161081_at | AA733664 | — | — | 1113 | — |
| | none | | | | | |
| | none | | | | | |
| | none | | | | | |
| | none | | | | | |
| | none | | | | | |
| | 95020_at | AI848868 | — | — | 1114 | — |
| | none | | | | | |

[0604] TABLE 94

| | mouse | | | | | |
|---|---|---|---|---|---|---|
| | mouse | | mouse_Ref | mouse_Ref | SEQ ID NO: | SEQ ID NO: |
| cat# | Probe ID | GenBank | Seq | SeqP | (nucleotide seq.) | (amino acid seq.) |
| 3 | 101469_at | AF009366 | NM_017464 | NP_059492 | 1115 | 1491 |
| 5 | 162349_i_at | AV173028 | NM_019959 | NP_064343 | 1116 | 1492 |
| 5 | 162365_i_at | AV231477 | NM_019959 | NP_064343 | 1116 | 1492 |
| 5 | 161549_f_at | AV246051 | NM_019959 | NP_064343 | 1116 | 1492 |
| 5 | 103676_at | AI551306 | NM_019959 | NP_064343 | 1116 | 1492 |
| 5 | 162487_f_at | AV122373 | NM_019959 | NP_064343 | 1116 | 1492 |
| 7 | — | AF338440 | NM_053083 | NP_444313 | 1117 | 1493 |
| 8 | none | | | | | |
| 8 | 114164_at | AW214638 | — | — | 1118 | — |
| 8 | none | | | | | |
| 8 | 110625_at | AI591648 | — | — | 1119 | — |
| 8 | 105356_at | AI607408 | — | — | 1120 | — |
| 8 | 112743_at | AI157595 | — | — | 1121 | — |
| 8 | 112061_at | AI465433 | — | — | 1122 | — |
| 8 | 133797_at | AI118550 | NM_139065 | NP_620704 | 1123 | 1494 |
| 8 | 112296_at | AA759831 | NM_139065 | NP_620704 | 1123 | 1494 |
| 8 | 111841_at | AI527656 | — | — | 1124 | — |
| 8 | 133349_at | AI037551 | — | — | 1125 | — |
| 8 | 102965_at | AW121646 | — | — | 1126 | — |
| 8 | 112671_at | AW122101 | — | — | 1127 | — |
| 9 | none | | | | | |
| 12 | 92626_at | X67209 | NM_008721 | NP_032747 | 1128 | 1495 |
| 12 | 96935_at | AW011791 | NM_026018 | NP_080294 | 1129 | 1496 |
| 12 | 162531_at | AW048375 | — | — | 1130 | — |
| 12 | 96935_at | AW011791 | NM_026018 | NP_080294 | 1129 | 1496 |
| 12 | 162531_at | AW048375 | — | — | 1130 | — |

[0605] TABLE 95

| | mouse | | | | | |
|---|---|---|---|---|---|---|
| | mouse | | mouse_Ref | mouse_Ref | SEQ ID NO: | SEQ ID NO: |
| cat# | Probe ID | GenBank | Seq | SeqP | (nucleotide seq.) | (amino acid seq.) |
| 14 | none | | | | | |
| 16 | 107575_at | AA980835 | — | — | 1131 | — |
| 17 | 169317_at | AV044941 | NM_022028 | NP_071311 | 1132 | 1497 |
| 17 | 111119_at | AA764217 | NM_022028 | NP_071311 | 1132 | 1497 |
| 17 | 111162_f_at | AA014158 | NM_022028 | NP_071311 | 1132 | 1497 |
| 17 | 114337_at | AW122502 | NM_022028 | NP_071311 | 1132 | 1497 |
| 17 | 112893_at | AI842196 | NM_022028 | NP_071311 | 1132 | 1497 |
| 17 | 169317_at | AV044941 | NM_022028 | NP_071311 | 1132 | 1497 |
| 17 | 111119_at | AA764217 | NM_022028 | NP_071311 | 1132 | 1497 |
| 17 | 111162_f_at | AA014158 | NM_022028 | NP_071311 | 1132 | 1497 |
| 17 | 114337_at | AW122502 | NM_022028 | NP_071311 | 1132 | 1497 |
| 17 | 112893_at | AI842196 | NM_022028 | NP_071311 | 1132 | 1497 |
| 17 | 115316_at | AI550677 | — | — | 1133 | — |
| 17 | 168371_f_at | AV254276 | — | — | 1134 | — |
| 17 | 106262_at | AA914186 | — | — | 1135 | — |
| 17 | 168490_at | AI662368 | — | — | 1136 | — |
| 17 | none | | | | | |
| 17 | 114263_at | AW121271 | — | — | 1137 | — |
| 21 | 109965_s_at | AA958946 | NM_015775 | NP_056590 | 1138 | 1498 |
| 21 | 131180_at | AI607826 | NM_015775 | NP_056590 | 1138 | 1498 |
| 21 | 164520_f_at | AV302474 | NM_015775 | NP_056590 | 1138 | 1498 |
| 21 | 101019_at | U74683 | NM_009982 | NP_034112 | 1139 | 1499 |
| 21 | 161251_f_at | AV316954 | NM_009982 | NP_034112 | 1139 | 1499 |
| 21 | 101020_at | AI842667 | NM_009982 | NP_034112 | 1139 | 1499 |
| 24 | — | AF233517 | NM_021893 | NP_068693 | 1140 | 1500 |
| 25 | 163157_at | AI606261 | NM_033373 | NP_203537 | 1141 | 1501 |
| 25 | 129268_at | AW122522 | — | — | 1142 | — |

[0606] TABLE 96

| | mouse | | | | | |
|---|---|---|---|---|---|---|
| | mouse | | mouse_Ref | mouse_Ref | SEQ ID NO: | SEQ ID NO: |
| cat# | Probe ID | GenBank | Seq | SeqP | (nucleotide seq.) | (amino acid seq.) |
| | 103066_at | L32973 | NM_320557 | NP_065582 | 1143 | 1502 |
| | 161186_f_at | AV246064 | NM_020557 | NP_065582 | 1143 | 1502 |
| | none | | | | | |
| | none | | | | | |
| | none | | | | | |
| | none | | | | | |
| | none | | | | | |

[0607] TABLE 97

| | mouse | | | | | |
|---|---|---|---|---|---|---|
| | mouse | | mouse_Ref | mouse_Ref | SEQ ID NO: | SEQ ID NO: |
| cat# | Probe ID | GenBank | Seq | SeqP | (nucleotide seq.) | (amino acid seq.) |
| 7 | 102741_at | AW046250 | NM_019655 | NP_062629 | 1144 | 1503 |
| 7 | 96188_at | AF052506 | NM_019655 | NP_062629 | 1144 | 1503 |
| 7 | none | | | | | |
| 8 | none | | | | | |
| 8 | none | | | | | |
| 8 | none | | | | | |
| 8 | none | | | | | |
| 9 | none | | | | | |
| 24 | 102699_at | J03368 | NM_013606 | NP_038634 | 1145 | 1504 |
| 24 | 98417_at | M21038 | NM_010846 | NP_034976 | 1146 | 1505 |
| | none | | | | | |
| | none | | | | | |
| | none | | | | | |
| | none | | | | | |
| | none | | | | | |

[0608] TABLE 98

| | mouse | | | | | |
|---|---|---|---|---|---|---|
| | mouse | | mouse_Ref | mouse_Ref | SEQ ID NO: | SEQ ID NO: |
| cat# | Probe ID | GenBank | Seq | SeqP | (nucleotide seq.) | (amino acid seq.) |
| 2 | 134663_at | AI502213 | — | — | 1147 | — |
| 2 | 110160_at | AI510217 | — | — | 1148 | — |
| 4 | none | | | | | |
| 7 | — | U42443 | NM_007532 | NP_031558 | 1149 | 1506 |
| 7 | — | U42443 | NM_007533 | NP_031558 | 1150 | 1506 |
| 7 | none | | | | | |
| 7 | 132809_at | AA762195 | — | — | 1151 | — |
| 7 | none | | | | | |
| 8 | 92909_at | X80171 | NM_008827 | NP_032853 | 1152 | 1507 |
| 8 | none | | | | | |
| 8 | 102907_at | AW125043 | — | — | 1153 | — |
| 8 | none | | | | | |
| 8 | 110028_at | AW124261 | — | — | 1154 | — |
| 8 | 112808_at | AI853680 | — | — | 1155 | — |
| 8 | 116098_at | AI646866 | — | — | 1156 | — |
| 8 | 107796_at | AW261774 | — | — | 1157 | — |
| 8 | none | | | | | |
| 8 | 161376_f_at | AV243059 | NM_133349 | NP_579927 | 1158 | 1508 |
| 8 | 160713_at | AI841579 | NM_133349 | NP_579927 | 1158 | 1508 |
| 8 | 167609_r_at | AW121990 | — | — | 1159 | — |
| 8 | 94233_at | AW048642 | NM_054099 | NP_473440 | 1160 | 1509 |
| 9 | 109385_at | AI315194 | NM_021384 | NP_067359 | 1161 | 1510 |
| 12 | 160415_at | AI604314 | NM_016674 | NP_057883 | 1162 | 1511 |
| 12 | 97546_at | AF072127 | NM_016674 | NP_057883 | 1162 | 1511 |
| 12 | none | | | | | |
| 16 | 109021_at | AW214142 | NM_030253 | NP_084529 | 1163 | 1512 |
| 16 | 163337_at | AA727483 | — | — | 1164 | — |

[0609] TABLE 99

| | | | | | | |
|---|---|---|---|---|---|---|
| 16 | 163337_at | AA727483 | — | — | 1164 | — |

| | mouse | | | | | |
|---|---|---|---|---|---|---|
| | mouse | | mouse_Ref | mouse_Ref | SEQ ID NO: | SEQ ID NO: |
| cat# | Probe ID | GenBank | Seq | SeqP | (nucleotide seq.) | (amino acid seq.) |
| 17 | 162006_r_at | AV334115 | — | — | 1165 | — |
| 17 | 100589_at | AW047808 | — | — | 1166 | — |
| 17 | 133126_at | AW107849 | — | — | 1167 | — |
| 17 | 102243_at | AF035527 | NM_007914 | NP_031940 | 1168 | 1513 |
| 17 | 114753_at | AW215423 | NM_007914 | NP_031940 | 1168 | 1513 |
| 17 | 110963_at | AI527695 | NM_007914 | NP_031940 | 1168 | 1513 |
| 17 | 114753_at | AF035527 | NM_007914 | NP_031940 | 1168 | 1513 |
| 17 | 102243_at | AW215423 | NM_007914 | NP_031940 | 1168 | 1513 |
| 17 | 110963_at | AI527695 | NM_007914 | NP_031940 | 1168 | 1513 |
| 17 | 108958_at | AI851818 | — | — | 1169 | — |
| 17 | 93342_at | AI852665 | — | — | 1170 | — |
| 17 | 92389_at | AB025411 | NM_011856 | NP_035986 | 1171 | 1514 |
| 17 | 133154_at | AW7125558 | — | — | 1172 | — |
| 20 | 135407_at | AW226397 | — | — | 1173 | — |
| 24 | — | AF268195 | NM_030732 | NP_109657 | 1174 | 1515 |
| 27 | none | | | | | |
| 27 | none | | | | | |
| | none | | | | | |

[0610] TABLE 100

| | mouse | | | | | |
|---|---|---|---|---|---|---|
| | mouse | | mouse_Ref | mouse_Ref | SEQ ID NO: | SEQ ID NO: |
| cat# | Probe ID | GenBank | Seq | SeqP | (nucleotide seq.) | (amino acid seq.) |
| 1 | 99669_at | X15986 | NM_008495 | NP_032521 | 1175 | 1516 |
| 2 | none | | | | | |
| 2 | 161239_r_at | AV281386 | NM_007697 | NP_031723 | 1176 | 1517 |
| 2 | 103088_at | X94310 | NM_007697 | NP_031723 | 1176 | 1517 |
| 2 | 167319_i_at | AV283855 | NM_007697 | NP_031723 | 1176 | 1517 |
| 2 | 169984_i_at | AV278112 | NM_007697 | NP_031723 | 1176 | 1517 |
| 2 | — | A46528 | — | — | 1177 | — |
| 2 | 100019_at | D45889 | NM_019389 | NP_062262 | 1178 | 1518 |
| 2 | 161370_f_at | AV239731 | NM_011519 | NP_035649 | 1179 | 1519 |
| 2 | 96033_at | Z22532 | NM_011519 | NP_035649 | 1179 | 1519 |
| 2 | 165372_at | AV056802 | — | — | 1180 | — |
| 4 | 164885_f_at | AV335220 | NM_009142 | NP_033168 | 1181 | 1520 |
| 4 | 98008_at | U92565 | NM_009142 | NP_033168 | 1181 | 1520 |
| 4 | 161752_r_at | AV290053 | NM_009142 | NP_033168 | 1181 | 1520 |
| 5 | 161157_r_at | AV231282 | NM_009369 | NP_033395 | 1182 | 1521 |
| 5 | 92877_at | L19932 | NM_009369 | NP_033395 | 1182 | 1521 |
| 5 | 160489_at | L24118 | NM_009369 | NP_033395 | 1182 | 1521 |
| 6 | 161593_r_at | AV291690 | — | — | 1183 | — |
| 6 | 103242_at | AW123834 | NM_009677 | NP_033807 | 1184 | 1522 |
| 6 | 92288_at | X54424 | NM_009677 | NP_033807 | 1184 | 1522 |
| 6 | none | | | | | |
| 7 | none | | | | | |
| 7 | 94906_at | M22679 | NM_007409 | NP_031435 | 1185 | 1523 |
| 7 | 106011_at | AW261476 | NM_018881 | NP_061369 | 1186 | 1524 |
| 7 | 165790_at | AA681923 | NM_019984 | NP_064368 | 1187 | 1525 |
| 7 | 94906_at | M22679 | NM_007409 | NP_031435 | 1185 | 1523 |

[0611] TABLE 101

| | | | | | | |
|---|---|---|---|---|---|---|
| 7 | 103905_at | AI314958 | — | — | 1188 | — |
| 7 | none | | | | | |
| 7 | 164478_r_at | AV246818 | NM_133198 | NP_573461 | 1189 | 1526 |
| 7 | 110291_at | AI256150 | NM_133198 | NP_573461 | 1189 | 1526 |
| 7 | none | | | | | |
| 7 | 162221_i_at | AV112892 | — | — | 1190 | — |
| 7 | 94842_at | AI853630 | — | — | 1191 | — |
| 7 | 162179_r_at | AV367224 | — | — | 1192 | — |
| 7 | none | | | | | |
| 7 | 160937_at | AF039391 | NM_016669 | NP_057878 | 1193 | 1527 |
| 7 | 166000_at | AV248813 | NM_016669 | NP_057878 | 1193 | 1527 |
| 7 | 101587_at | U89419 | NM_010145 | NP_034275 | 1194 | 1528 |
| 7 | 92851_at | U49430 | NM_007752 | NP_031778 | 1195 | 1529 |
| 7 | 93688_at | D21826 | NM_007717 | NP_031743 | 1196 | 1530 |
| 7 | 94507_at | U15977 | NM_007981 | NP_032007 | 1197 | 1531 |
| 7 | 117284_at | AI848384 | NM_008131 | NP_032157 | 1198 | 1532 |
| 7 | 99498_at | M60803 | NM_008131 | NP_032157 | 1198 | 1532 |
| 7 | 94852_at | U09114 | NM_008131 | NP_032157 | 1198 | 1532 |
| 7 | 161826_r_at | AV381947 | NM_008131 | NP_032157 | 1198 | 1532 |
| 7 | 101991_at | D16215 | NM_010231 | NP_034361 | 1199 | 1533 |
| 7 | 104421_at | U87147 | NM_008030 | NP_032056 | 1200 | 1534 |
| 7 | 168706_r_at | AV225591 | NM_008161 | NP_032187 | 1201 | 1535 |
| 7 | 101676_at | U13705 | NM_008161 | NP_032187 | 1201 | 1535 |

| | mouse | | | | | |
|---|---|---|---|---|---|---|
| | mouse | | mouse_Ref | mouse_Ref | SEQ ID NO: | SEQ ID NO: |
| cat# | Probe ID | GenBank | Seq | SeqP | (nucleotide seq.) | (amino acid seq.) |
| 8 | 113969_at | AW208826 | — | — | 1202 | — |
| 8 | none | | | | | |
| 8 | 135495_r_at | AV242700 | — | — | 1203 | — |
| 8 | 162919_at | AI227478 | — | — | 1204 | — |
| 8 | 112372_at | AW230421 | — | — | 1205 | — |
| 8 | 108490_at | AI463227 | — | — | 1206 | — |
| 8 | 94418_at | AI839004 | NM_130450 | NP_569717 | 1207 | 1536 |
| 10 | 169261_at | AV298003 | NM_023580 | NP_076069 | 1208 | 1537 |
| 10 | 100143_at | Y07711 | NM_011777 | NP_035907 | 1209 | 1538 |
| 10 | 103451_at | AI835159 | — | — | 1210 | — |
| 10 | 169902_at | AV214820 | — | — | 1211 | — |
| 10 | 167168_f_at | AV127592 | — | — | 1212 | — |
| 10 | 160067_at | AW125329 | — | — | 1213 | — |

[0612] TABLE 102

| | | | | | | |
|---|---|---|---|---|---|---|
| 10 | 93422_at | U62391 | NM_011074 | NP_035204 | 1214 | 1539 |
| 10 | 93421_at | AF033655 | NM_011074 | NP_035204 | 1214 | 1539 |
| 10 | 168913_r_at | AV347594 | NM_011074 | NP_035204 | 1214 | 1539 |
| 10 | 167725_f_at | AI847882 | NM_011074 | NP_035204 | 1214 | 1539 |
| 10 | 113152_at | AI850672 | NM_016866 | NP_058562 | 1215 | 1540 |
| 10 | 160806_at | AF099988 | NM_016866 | NP_058562 | 1215 | 1540 |

| | mouse | | | | | |
|---|---|---|---|---|---|---|
| | mouse | | mouse_Ref | mouse_Ref | SEQ ID NO: | SEQ ID NO: |
| cat# | Probe ID | GenBank | Seq | SeqP | (nucleotide seq.) | (amino acid seq.) |
| 11 | 96947_at | AW046273 | — | — | 1216 | — |
| 11 | 162144_at | AV351508 | — | — | 1217 | — |
| 11 | 107600_at | AI838753 | — | — | 1218 | — |
| 11 | 98054_at | L33416 | NM_007899 | NP_031925 | 1219 | 1541 |
| 11 | 170917_r_at | AV092620 | NM_007899 | NP_031925 | 1219 | 1541 |
| 11 | 160641_at | AI021573 | NM_133232 | NP_573495 | 1220 | 1542 |
| 11 | 103577_at | AI326331 | NM_133232 | NP_573495 | 1220 | 1542 |
| 12 | 116451_at | AA615200 | — | — | 1221 | — |
| 12 | 116451_at | AA615200 | — | — | 1221 | — |
| 12 | none | | | | | |
| 12 | 160508_at | AW209486 | — | — | 1222 | — |
| 12 | — | AH009304 | NM_017369 | NP_059065 | 1223 | 1543 |
| 12 | 93430_at | AF000236 | NM_007722 | NP_031748 | 1224 | 1544 |
| 12 | 99915_at | L41352 | NM_009704 | NP_033834 | 1225 | 1545 |
| 12 | 96339_at | AW048363 | NM_053257 | NP_444487 | 1226 | 1546 |
| 12 | 167252_at | AV106158 | NM_053257 | NP_444487 | 1226 | 1546 |
| 12 | 164621_i_at | AV157335 | NM_053257 | NP_444487 | 1226 | 1546 |
| 12 | 108822_at | AI615758 | NM_053110 | NP_444340 | 1227 | 1547 |
| 12 | 168624_at | AV223501 | NM_053110 | NP_444340 | 1227 | 1547 |
| 12 | 92956_at | X74760 | NM_008716 | NP_032742 | 1228 | 1548 |
| 12 | 98387_at | L26047 | NM_009747 | NP_033877 | 1229 | 1549 |
| 12 | 129282_at | AW124518 | NM_019571 | NP_062517 | 1230 | 1550 |
| 12 | 140325_at | AW125637 | NM_019571 | NP_062517 | 1230 | 1550 |
| 12 | 163391_at | AW123971 | NM_019571 | NP_062517 | 1230 | 1550 |
| 12 | 92426_at | AI877157 | NM_019571 | NP_062517 | 1230 | 1550 |
| 13 | 92494_at | AJ238978 | NM_011922 | NP_036052 | 1231 | 1551 |

[0613] TABLE 103

| | | | | | | |
|---|---|---|---|---|---|---|
| 13 | — | AJ011800 | NM_010030 | NP_034160 | 1232 | 1552 |
| 13 | 98420_at | AA919924 | NM_053261 | NP_44449 | 1233 | 1553 |
| 13 | AI605678 | — | — | — | 1234 | — |
| 13 | 161918_at | AV380611 | NM_009731 | NP_033861 | 1235 | 1554 |
| 13 | 102826_at | U05663 | NM_009731 | NP_033861 | 1235 | 1554 |
| 13 | 132885_at | AI429094 | — | — | 1236 | — |
| 13 | 160544_at | AJ223066 | NM_010634 | NP_034764 | 1237 | 1555 |
| 13 | 109764_at | AI840194 | NM_010634 | NP_034764 | 1237 | 1555 |

| | mouse | | | | | |
|---|---|---|---|---|---|---|
| | mouse | | mouse_Ref | mouse_Ref | SEQ ID NO: | SEQ ID NO: |
| cat# | Probe ID | GenBank | Seq | SeqP | (nucleotide seq.) | (amino acid seq.) |
| 14 | 100998_at | M21932 | NM_010379 | NP_034509 | 1238 | 1556 |
| 14 | 116266_at | AW122580 | NM_010382 | NP_034512 | 1239 | 1557 |
| 14 | 100998_at | M21932 | NM_010379 | NP_034509 | 1238 | 1556 |
| 14 | 116266_at | AW122580 | NM_010382 | NP_034512 | 1239 | 1557 |
| 15 | 94724_at | Y13185 | NM_019471 | NP_062344 | 1240 | 1558 |
| 15 | 162369_f_at | AV239570 | NM_013599 | NP_038627 | 1241 | 1559 |
| 15 | 99957_at | X72795 | NM_013599 | NP_038627 | 1241 | 1559 |
| 15 | 168521_r_at | AV231860 | NM_013599 | NP_038627 | 1241 | 1559 |
| 16 | 161716_at | AV252296 | NM_010234 | NP_034364 | 1242 | 1560 |
| 16 | 160901_at | V00727 | NM_010234 | NP_034364 | 1242 | 1560 |
| 16 | 167990_at | AA118615 | — | — | 1243 | — |
| 16 | 161716_at | AV252296 | NM_010234 | NP_034364 | 1242 | 1560 |
| 16 | 160901_at | V00727 | NM_010234 | NP_034364 | 1242 | 1560 |
| 16 | 167990_at | AA118615 | — | — | 1243 | — |
| 16 | 93506_at | AW121063 | NM_133668 | NP_598429 | 1244 | 1561 |
| 16 | 160464_s_at | U60593 | NM_1010884 | NP_035014 | 1245 | 1562 |
| 16 | 110774_at | AI852667 | — | — | 1246 | — |
| 16 | 163286_at | AW122051 | — | — | 1247 | — |
| 16 | 101076_r_at | AB016592 | NM_011783 | NP_035913 | 1248 | 1563 |
| 16 | 101075_f_at | AB016532 | NM_011783 | NP_035913 | 1248 | 1563 |
| 16 | 162200_r_at | AV062476 | NM_011783 | NP_035913 | 1248 | 1563 |
| 17 | 106584_at | AI1152881 | — | — | 1249 | — |

[0614] TABLE 104

| | | | | | | |
|---|---|---|---|---|---|---|
| 17 | 171229_i_at | AV167772 | — | — | 1250 | — |
| 17 | none | | | | | |
| 17 | none | | | | | |
| 17 | 162559_at | AI837711 | — | — | 1251 | — |
| 17 | 168765_at | AV245837 | — | — | 1252 | — |
| 17 | 111732_at | AA881910 | — | — | 1253 | — |
| 17 | 108756_at | AW045893 | NM_134094 | NP_598855 | 1254 | 1564 |
| 17 | 112376_at | AW124163 | NM_134094 | NP_598855 | 1254 | 1564 |
| 17 | 140699_at | AW124014 | — | — | 1255 | — |
| 17 | 103460_at | AI849939 | — | — | 1256 | — |
| 17 | 163822_at | AA073823 | NM_133743 | NP_598504 | 1257 | 1565 |
| 17 | 169732_i_at | AV075775 | NM_133743 | NP_598504 | 1257 | 1565 |

| | mouse | | | | | |
|---|---|---|---|---|---|---|
| | mouse | | mouse_Ref | mouse_Ref | SEQ ID NO: | SEQ ID NO: |
| cat# | Probe ID | GenBank | Seq | Seq | (nucleotide seq.) | (amino acid seq.) |
| 18 | 102701_at | M21856 | — | AAA40425 | 1258 | 1566 |
| 18 | 102690_at | AF047529 | NM_007814 | NP_031840 | 1259 | 1567 |
| 18 | none | | | | | |
| 18 | none | | | | | |
| 19 | 168611_i_at | AV216941 | NM_013642 | NP_038670 | 1260 | 1568 |
| 19 | 104598_at | X61940 | NM_013642 | NP_038670 | 1260 | 1568 |
| 19 | 92380_r_at | AJ133130 | NM_011219 | NP_035349 | 1261 | 1569 |
| 19 | 169828_f_at | AV151279 | NM_011219 | NP_035349 | 1261 | 1569 |
| 19 | 134749_f_at | AI662731 | NM_011219 | NP_035349 | 1261 | 1569 |
| 19 | 165782_at | AW120652 | | | 1262 | |
| 20 | 95083_at | X81581 | NM_008343 | NP_032369 | 1263 | 1570 |
| 20 | 95082_at | AI842277 | NM_008343 | NP_032369 | 1263 | 1570 |
| 20 | 95083_at | X81581 | NM_008343 | NP_032369 | 1263 | 1570 |
| 20 | 95082_at | AI842277 | NM_008343 | NP_032369 | 1263 | 1570 |
| 20 | 103904_at | X81584 | NM_008344 | NP_032370 | 1264 | 1571 |
| 20 | 100715_at | U89840 | NM_020597 | NP_065622 | 1265 | 1572 |
| 21 | none | | | | | |
| 22 | | AK018226 | NM_110043 | NP_110043 | 1266 | 1573 |

[0615] TABLE 105

| | | | | | | |
|---|---|---|---|---|---|---|
| 22 | 103611_at | AB012693 | NM_010581 | NP_034711 | 1267 | 1574 |
| 22 | 94147_at | M33960 | NM_008871 | NP_032897 | 1268 | 1575 |
| 22 | 94147_at | M33960 | NM_008871 | NP_032897 | 1268 | 1575 |
| 22 | 170241_f_at | AV077498 | MM_009257 | NP_033283 | 1269 | 1576 |
| 22 | 100034_at | U54705 | NM_009257 | NP_033283 | 1269 | 1576 |
| 22 | 165730_at | AI646751 | NM_009257 | NP_033283 | 1269 | 1576 |

| | mouse | | | | | |
|---|---|---|---|---|---|---|
| | mouse | | mouse_Ref | mouse_Ref | SEQ id no: | SEQ ID NO: |
| cat# | Probe ID | GenBank | Seq | SeqP | (nucleotide seq.) | (amino acid seq.) |
| 23 | 101634_at | M33212 | NM_008722 | NP_032748 | 1270 | 1577 |
| 23 | 103448_at | M83218 | NM_013650 | NP_038678 | 1271 | 1578 |
| 23 | 165722_r_at | AV300070 | NM_008722 | NP_032748 | 1272 | 1577 |
| 23 | 165723_at | AV295738 | NM_008722 | NP_032748 | 1272 | 1577 |
| 24 | 137179_at | AI325535 | — | — | 1273 | — |
| 24 | 100127_at | M35523 | — | AAA37454 | 1274 | 1579 |
| 24 | 137179_at | AI325535 | — | — | 1273 | — |
| 24 | 100127_at | M35523 | — | AAA37454 | 1274 | 1579 |
| 24 | 110236_at | AI430293 | — | — | 1275 | — |
| 24 | 110236_at | AI430293 | — | — | 1275 | — |
| 24 | 165779_i_at | AW124292 | — | — | 1276 | — |
| 24 | 94291_at | L04503 | NM_011681 | NP_035811 | 1277 | 1580 |
| 24 | 109308_at | AI503500 | — | — | 1278 | — |
| 24 | 94712_at | U73620 | NM_009506 | NP_033532 | 1279 | 1581 |
| 24 | 103579_at | X53247 | NM_009008 | NP_033034 | 1280 | 1582 |
| 25 | 101046_at | X56397 | NM_011701 | NP_035831 | 1281 | 1583 |
| 25 | 162379_r_at | AV245272 | NM_011701 | NP_035831 | 1281 | 1583 |
| 25 | 161361_s_at | AV213431 | NM_011618 | NP_035748 | 1282 | 1584 |
| 25 | 101383_at | AJ131711 | NM_011618 | NP_035748 | 1282 | 1584 |
| 25 | 92739_at | L28819 | NM_008412 | NP_032438 | 1283 | 1585 |
| 25 | 113796_at | AI314966 | NM_024427 | NP_077745 | 1284 | 1586 |
| 25 | 105003_at | AA939674 | NM_024427 | NP_077745 | 1284 | 1586 |
| 25 | 160532_at | M22479 | NM_024427 | NP_077745 | 1284 | 1586 |
| 25 | 113796_at | AI314966 | NM_024427 | NP_077745 | 1284 | 1586 |
| 25 | 105003_at | AA939674 | NM_024427 | NP_077745 | 1284 | 1586 |
| 25 | 160532_at | M22479 | NM_024427 | NP_077745 | 1284 | 1586 |

[0616] TABLE 106

| | | | | | | |
|---|---|---|---|---|---|---|
| 25 | 113796_at | AI314966 | NM_024427 | NP_077745 | 1284 | 1586 |
| 25 | 105003_at | AA939674 | NM_024427 | NP_077745 | 1284 | 1586 |
| 25 | 160532_at | M22479 | NM_024427 | NP_077745 | 1284 | 1586 |
| 25 | 100446_r_at | X91825 | NM_009265 | NP_033291 | 1285 | 1587 |
| 25 | 100445_f_at | X91825 | NM_009265 | NP_033291 | 1285 | 1587 |
| 25 | 164632_i_at | AV225959 | — | — | 1286 | — |
| 25 | 160852_at | D16313 | NM_008469 | NP_032495 | 1287 | 1588 |
| 25 | 164618_f_at | AV171812 | NM_008469 | NP_032495 | 1287 | 1588 |
| 25 | 163295_at | AI561819 | NM_025276 | NP_079552 | 1288 | 1589 |

| | mouse | | | | | |
|---|---|---|---|---|---|---|
| | mouse | | mouse_Ref | mouse_Ref | SEQ ID NO: | SEQ ID NO: |
| cat# | Probe ID | GenBank | Seq | SeqP | (nucleotide seq.) | (amino acid seq.) |
| 26 | 98122_at | AF074600 | NM_010723 | NP_034853 | 1289 | 1590 |
| 26 | 99052_at | D76432 | NM_011546 | NP_035676 | 1290 | 1591 |
| 26 | 104645_at | AI853712 | NM_033563 | NP_291041 | 1291 | 1592 |
| 26 | 112898_at | AW045576 | NM_033563 | NP_291041 | 1291 | 1592 |
| 26 | 107020_at | AW049268 | NM_033563 | NP_291041 | 1291 | 1592 |
| 26 | 114906_at | AI646497 | NM_033563 | NP_291041 | 1291 | 1592 |
| 26 | 100736_at | L77900 | NM_013800 | NP_038828 | 1292 | 1593 |
| 26 | 100050_at | M31885 | — | AAA37879 | 1293 | 1594 |
| 26 | 97487_at | X70296 | NM_009255 | NP_033281 | 1294 | 1595 |
| 27 | 103800_at | AB019003 | NM_013790 | NP_038818 | 1295 | 1596 |
| 27 | 165744_at | AW124768 | NM_013790 | NP_038818 | 1295 | 1596 |
| 27 | 169447_r_at | AV168159 | NM_013790 | NP_038818 | 1295 | 1596 |
| 27 | 100064_f_at | M63801 | NM_010288 | NP_034418 | 1296 | 1597 |
| 27 | 100065_r_at | M63801 | NM_010288 | NP_034418 | 1296 | 1597 |
| 27 | 113916_at | AI182792 | NM_009701 | NP_033831 | 1297 | 1598 |
| 27 | 92792_at | U69135 | NM_011671 | NP_035801 | 1298 | 1599 |
| 27 | 110692_at | AI606632 | NM_011325 | NP_035455 | 1299 | 1600 |
| 27 | — | AK010437 | NM_027399 | NP_081675 | 1300 | 1601 |
| 27 | 163918_at | AV216203 | — | — | 1301 | — |
| 27 | 169112_r_at | AV216203 | — | — | 1301 | — |
| | none | | | | | |
| | 140497_at | AW124202 | — | — | 1302 | — |
| | 131152_at | AW142707 | — | — | 1303 | — |

[0617] TABLE 107

| | mouse | | | | | |
|---|---|---|---|---|---|---|
| | mouse | | mouse_Ref | mouse_Ref | SEQ ID NO: | SEQ ID NO: |
| cat# | Probe ID | GenBank | Seq | SeqP | (nucleotide seq.) | (amino acid seq.) |
| 2 | 97655_at | Y11169 | NM_007882 | NP_031908 | 1304 | 1602 |
| 2 | 97655_at | Y11169 | NM_007882 | NP_031908 | 1304 | 1602 |
| 5 | — | BB850070 | — | — | 1305 | — |
| 7 | 106071_at | AI852199 | — | — | 1306 | — |
| 7 | 109537_at | AW122637 | NM_019835 | NP_062809 | 1307 | 1603 |
| 7 | 93015_at | X65021 | NM_010356 | NP_03486 | 1308 | 1604 |
| 7 | 164617_i_at | AV168894 | NM_010356 | NP_03486 | 1308 | 1604 |
| 7 | 103665_at | AW12253 | NM_130450 | NP_569717 | 1309 | 1605 |
| 7 | 94418_at | AI839004 | NM_130450 | NP_569717 | 1309 | 1605 |
| 8 | 102258_at | AF062476 | NM_009294 | NP_033317 | 1310 | 1606 |
| 8 | 103460_at | AI849939 | NM_029083 | NP_083359 | 1311 | 1607 |
| 8 | none | | | | | |
| 8 | 167736_r_at | AV212218 | NM_133687 | NP_598448 | 1312 | 1608 |
| 8 | 95701_at | AW124069 | NM_133687 | NP_598448 | 1312 | 1608 |
| 8 | 110541_at | AI643915 | — | — | 1313 | — |
| 8 | 106088_at | AI844788 | — | — | 1314 | — |
| 8 | 165731_at | AV204596 | — | — | 1315 | — |
| 8 | 162562_at | AI840292 | NM_023270 | NP_075759 | 1316 | 1609 |
| 8 | 108010_at | AW210455 | NM_023270 | NP_075759 | 1316 | 1609 |
| 8 | none | | | | | |
| 8 | — | AW046177 | — | — | 1317 | — |
| 8 | none | | | | | |
| 8 | none | | | | | |
| 8 | 162963_at | AI835402 | — | — | 1318 | — |
| 8 | none | | | | | |
| 8 | none | | | | | |
| 8 | 115700_at | AI314284 | NM_025807 | NP_080083 | 1319 | 1610 |
| 8 | — | AK008761 | NM_028841 | NP_083117 | 1320 | 1611 |
| 8 | none | | | | | |
| 8 | 106880_at | AW121537 | — | — | 1321 | — |
| 8 | 102018_at | AI854879 | — | — | 1322 | — |
| 8 | none | | | | | |
| 8 | 115700_at | AI314284 | NM_025807 | NP_080083 | 1319 | 1610 |

[0618] TABLE 108

| | | | | | | |
|---|---|---|---|---|---|---|
| 8 | 115700_at | AI314284 | NM_025807 | NP_080083 | 1319 | 1610 |
| 8 | — | X73360 | — | CAA51770 | 1323 | 1612 |
| 8 | none | | | | | |

| | mouse | | | | | |
|---|---|---|---|---|---|---|
| | mouse | | mouse_Ref | mouse_Ref | SEQ ID NO: | SEQ ID NO: |
| cat# | Probe ID | GenBank | Seq | SeqP | (nucleotide seq.) | (amino acid seq.) |
| 10 | 96570_at | AV381276 | — | — | 1324 | — |
| 10 | 111191_at | AW120521 | — | — | 1325 | — |
| 11 | none | | | | | |
| 12 | 101913_at | AW214298 | NM_010423 | NP_034553 | 1326 | 1613 |
| 12 | 170560_r_at | AV333303 | NM_010423 | NP_034553 | 1326 | 1613 |
| 12 | 161451_r_at | AV292193 | NM_010423 | NP_034553 | 1326 | 1613 |
| 12 | 95671_at | AJ243895 | NM_010423 | NP_034553 | 1326 | 1613 |
| 16 | none | | | | | |
| 17 | none | | | | | |
| 17 | none | | | | | |
| 17 | 94370_at | AA615075 | — | — | 1327 | — |
| 17 | 94370_at | AA615075 | — | — | 1327 | — |
| 17 | 160446_at | U46068 | — | AAA87581 | 1328 | 1614 |
| 17 | 171144_i_at | AV087463 | — | — | 1329 | — |
| 17 | 168955_i_at | AV092579 | — | — | 1330 | — |
| 17 | 169746_at | AV090196 | — | — | 1331 | — |
| 17 | — | AI845714 | NM_011126 | NP_035256 | 1332 | 1615 |
| 20 | 94297_at | U16959 | NM_010220 | NP_034350 | 1333 | 1616 |
| 20 | 100636_at | U28656 | NM_007918 | NP_031944 | 1334 | 1617 |
| 25 | 92313_at | AI844066 | NM_007730 | NP_031756 | 1335 | 1618 |
| 25 | 92314_at | U25652 | NM_007730 | NP_031756 | 1335 | 1618 |

[0619] TABLE 109

| | mouse | | | | | |
|---|---|---|---|---|---|---|
| | mouse | | mouse_Ref | mouse_Ref | SEQ ID NO: | SEQ ID NO: |
| cat# | Probe ID | GenBank | Seq | SeqP | (nucleotide seq.) | (amino acid seq.) |
| 27 | 109069_at | AI255982 | NM_016917 | NP_058613 | 1336 | 1619 |
| 27 | 97759_at | U09383 | NM_010610 | NP_034740 | 1337 | 1620 |
| 27 | 97759_at | U09383 | NM_010610 | NP_034740 | 1337 | 1620 |
| 27 | 98994_at | AF081499 | NM_011402 | NP_035532 | 1338 | 1621 |
| 27 | none | | | | | |
| | none | | | | | |
| | none | | | | | |
| | 94637_at | X85992 | — | CAA59984 | 1339 | 1622 |
| | none | | | | | |
| | none | | | | | |
| | none | | | | | |
| | 114451_at | AI1848332 | — | — | 1340 | — |
| | 93178_at | AW050346 | — | — | 1341 | — |
| | none | | | | | |
| | none | | | | | |
| | 96220_at | AW123157 | — | — | 1342 | — |
| | 160978_at | AW261569 | — | — | 1343 | — |
| | none | | | | | |
| | 108954_at | AW060536 | NM_025980 | NP_080256 | 1344 | 1623 |
| | 164706_at | AV022728 | NM_025980 | NP_080256 | 1344 | 1623 |
| | none | | | | | |
| | 170083_r_at | AV338868 | — | — | 1345 | — |
| | 117306_at | AW120879 | — | — | 1346 | — |
| | 170414_i_at | AV333624 | — | — | 1347 | — |
| | 105944_at | AI844171 | — | — | 1348 | — |
| | none | | | | | |

[0620] TABLE 110

| | mouse | | | | | |
|---|---|---|---|---|---|---|
| | mouse | | mouse_Ref | mouse_Ref | SEQ ID NO: | SEQ ID NO: |
| cat# | Probe ID | GenBank | Seq | SeqP | (nucleotide seq.) | (amino acid seq.) |
| 3 | none | | | | | |
| 4 | 96953_at | AW120786 | NM_019568 | NP_062514 | 1349 | 1624 |
| 8 | 113969_at | AW208826 | — | — | 1350 | — |
| 8 | — | BB553960 | — | — | 1351 | — |
| 8 | 163461_at | AA589180 | NM_024246 | NP_077208 | 1352 | 1625 |
| 8 | 170263_f_at | AV092570 | NM_024246 | NP_077208 | 1352 | 1625 |
| 8 | none | | | | | |
| 8 | none | | | | | |
| 8 | none | | | | | |
| 8 | 163845_i_at | AA387607 | NM_026345 | NP_080621 | 1353 | 1626 |
| 8 | 111405_at | AI847396 | — | — | 1354 | — |
| 8 | 111405_at | AI847396 | — | — | 1354 | — |
| 8 | none | | | | | |
| 8 | 98092_at | AA790307 | NM_139198 | NP_631937 | 1355 | 1627 |
| 8 | none | | | | | |
| 8 | 105858_at | AI847445 | — | — | 1356 | — |
| 8 | none | | | | | |
| 10 | 97525_at | U48403 | NM_008194 | NP_032220 | 1357 | 1628 |
| 10 | 169383_r_at | AV087577 | NM_008194 | NP_032220 | 1357 | 1628 |
| 12 | 160508_at | AW209486 | — | — | 1358 | — |
| 17 | 97900_at | AI845714 | NM_011126 | NP_035256 | 1359 | 1629 |
| 17 | 97900_at | AI845714 | NM_011126 | NP_035256 | 1359 | 1629 |
| 17 | 169613_at | AV297752 | NM_021554 | NP_067529 | 1360 | 1630 |
| 17 | 95045_at | AI844469 | NM_021554 | NP_067529 | 1360 | 1630 |
| 25 | — | AF312019 | — | — | 1361 | — |

[0621] TABLE 111

| | mouse | | | | | |
|---|---|---|---|---|---|---|
| | mouse | | mouse_Ref | mouse_Ref | SEQ ID NO: | SEQ ID NO: |
| cat# | Probe ID | GenBank | Seq | SeqP | (nucleotide seq.) | (amino acid seq.) |
| 26 | none | | | | | |
| 26 | 113151_at | AI854569 | NM_026570 | NP_080846 | 1362 | 1631 |
| 26 | 171096_i_at | AV045457 | NM_026570 | NP_080846 | 1362 | 1631 |
| 26 | 169003_f_at | AV121953 | NM_026570 | NP_080846 | 1362 | 1631 |
| | none | | | | | |
| | none | | | | | |
| | none | | | | | |

[0622] TABLE 112

| | mouse | | | | | |
|---|---|---|---|---|---|---|
| | mouse | | mouse_Ref | mouse_Ref | SEQ ID NO: | SEQ ID NO: |
| cat# | Probe ID | GenBank | Seq | SeqP | (nucleotide seq.) | (amino acid seq.) |
| 2 | 97655_at | Y11169 | NM_007882 | NP_031908 | 1363 | 1632 |
| 5 | 160489_at | L24118 | NM_009396 | NP_033422 | 1364 | 1633 |
| 7 | none | | | | | |
| 17 | 133045_at | AU040173 | — | — | 1365 | — |
| 22 | 103611_at | AB012693 | NM_010581 | NP_034711 | 1366 | 1634 |
| | 94780_at | AI987985 | — | — | 1367 | — |
| | 136442_at | AI593316 | — | — | 1368 | — |
| | none | | | | | |
| | none | | | | | |
| | none | | | | | |
| | none | | | | | |
| | none | | | | | |
| | 130772_at | AI838844 | NM_011838 | NP_035968 | 1369 | 1635 |
| | 137205_f_at | AI839851 | NM_011838 | NP_035968 | 1369 | 1635 |
| | none | | | | | |
| | none | | | | | |
| | none | | | | | |

[0623] TABLE 113

| | mouse | | | | | |
|---|---|---|---|---|---|---|
| | mouse | | mouse_Ref | mouse_Ref | SEQ ID NO: | SEQ ID NO: |
| cat# | Probe ID | GenBank | Seq | SeqP | (nucleotide seq.) | (amino acid seq.) |
| 1 | 99669_at | X15986 | NM_008495 | NP_032521 | 1370 | 1636 |
| 2 | 92936_at | X14943 | NM_007727 | NP_031753 | 1371 | 1637 |
| 2 | 164059_f_at | X14943 | NM_007727 | NP_031753 | 1371 | 1637 |
| 2 | 105826_at | AI843096 | NM_007727 | NP_031753 | 1371 | 1637 |
| 2 | 170177_r_at | AV331012 | NM_007727 | NP_031753 | 1371 | 1637 |
| 7 | 95343_at | AB013848 | NM_011059 | NP_035189 | 1372 | 1638 |
| 7 | 103803_at | AB013849 | NM_011060 | NP_035190 | 1373 | 1639 |
| 7 | none | | | | | |
| 8 | none | | | | | |
| 8 | none | | | | | |
| 8 | none | | | | | |
| 8 | none | | | | | |
| 27 | 113916_at | AI182792 | NM_009701 | NP_033831 | 1374 | 1640 |
| | — | AF184981 | NM_018881 | NP_061369 | 1375 | 1641 |
| | none | | | | | |

5. Determination of the expression levels of the genes narrowed down in Section 4 in the human goblet cell differentiation model and the mouse OVA antigen-exposed bronchial hypersensitivity model

[0624] Eighty-eight genes, most of which were recognized as genes whose expression levels were altered in human and mouse, were selected from the genes narrowed down in Section 4. A quantitative PCR assay was carried out with ABI 7700 using cDNA from the human goblet cell differentiation model and using cDNA from the mouse OVA antigen-exposed bronchial hypersensitivity model.

[0625] The primers and TaqMan probe used in the assay with ABI 7700 were designed based on the information on the sequence of each gene utilizing Primer Express (PE Biosystems). The 5′ and 3′ ends of the TaqMan probe were labeled with FAM (6-carboxy-fluorescein) and TAMRA (6-carboxy-N,N,N′,N′-tetramethylrhodamine), respectively. The nucleotide sequences of oligonucleotides for the forward primer (F), reverse primer (R), and TaqMan probe (TP) for each gene are shown below. The nucleotide sequences of the forward primer, TaqMan probe, and reverse primer used in the detection of each gene are indicated after probe ID, Accession No., symbol for each gene, and gene name, each of which are separated by //. The number in the parenthesis after each nucleotide sequence refers to the corresponding SEQ ID NO. The 5′ and 3′ ends of the TaqMan probe were labeled with FAM (6-carboxy-fluorescein) and TAMRA (6-carboxy-N,N,N′,N′-tetramethylrhodamine), respectively.

[0626] Genes Whose Expression Levels Varied in Both Humans and Mice:

```
A1//NM_005409//SCYB11//“small inducible cytokine
subfamily B (Cys-X-Cys), member 11 precursor”
    CCTTGGCTGTGATATTGTGTGC (1642)
    ACGCTGTCTTTGCATAGGCCCT (1643)
    CTCAATATCTGCCACTTTCACTGC (1644)
A4//U21931//FBP1//“fructose-1,6-biphosphatase
(FBP1) gene, exon 7”
    TGTCTCACACAGCAGTACCCTG (1645)
    TGCTGTGCACCTTACATTCCTAGAGAGCAG (1646)
    GTGCCAAGCATTCTACAGCATT (1647)
A6//“NM_003856, NM_016232”//IL1RL1//interleukin 1
receptor-like 1
    TGACTGAGGACGCAGGTGATT (1648)
    CCAGGTCCTTCACGGTCAAGGATGA (1649)
    GGGCTCCGATTACTGGAAACA (1650)
A9//U88317//ALOX15//arachidonate 15-lipoxygenase
    CTGCAGACCTGGTGTCGAGAG (1651)
    TCACTGAAATCGGGCTGCAAGGG (1652)
    ACAGGAAACCCTCGGTCCTG (1653)
A10//D26579//ADAM48//a disintegrin and metallopro-
teinase domain 8 precursor
    TGCTCCTCCGGTCACTGTG (1654)
    CAGCCCACCCTTCCCAGTTCCTG (1655)
    TTGATGACCTGCTTTGGTGC (1656)
A11//Y12653//diubiquitin//diubiquitin
    TGTCCGGTCTAAGACCAAGGTTC (1657)
    TGTGCAGGACCAGGTTCTTTTGCTGG (1658)
    GGCTTCTCCGTGGCTTTAAGA (1659)
A19//NM_000120//EPHX1//epoxide hydrolase 1
    TGAGGAGATCCACGACTTACACC (1660)
    CGATAAGTTCCGTTTCACCCCACCTTTG (1661)
    TCAGGTAGTTGGAGTTGAAGCCAT (1662)
A22//XM_051522//RDC1//G protein-coupled receptor
    CGTGGACCGCTACCTCTCC (1663)
    TCACCTACTTCACCAACACCCCCAGC (1664)
    GGCGTACCATCTTCTTCCTGC (1665)
A24//NM_000598//IGFBP3//insulin-like growth
factor-binding protein 3
    CAGCGCTACAAAGTTGACTACGA (1666)
    CCATATTCTGTCTCCCGCTTGGACTCG (1667)
    CAGGTGATTCAGTGTGTCTTCCA (1668)
A25//m62402//IGFBP6//insulin-like growth factor-
binding protein 6
    CCAAGCAGGCACTGCCC (1669)
    CCACAGGATGTGAACCGCAGAGACC (1670)
    CGTGGTAGAGGTGCCTGGA (1671)
A26//NM_002964//S100A8//S100 calcium-binding
protein A8
    AGCTGGAGAAAGCCTTGAACTCT (1672)
    TCCATGCCGTCTACAGGGATGACCTG (1673)
    CTGAGGACACTCGGTCTCTAGCA (1674)
E1//NM_001843//CNTN1//contactin 1
    GGTAGAGGAGAGCCCAGTATACCA (1675)
    TGCTGCACCAAATGTGGCTCCTTC (1676)
    GGCTTAAATGCCACTATGTAACCA (1677)
A57//NM_080657//cig5//vipirin
    AAGAGGACATGACGGAACAGATC (1678)
    AAGCACTAAACCCTGTCCGCTGGAAAGT (1679)
    CCACAATTCTCACCCTCAATTAAGA (1680)
A59//u77643//SECTM1//secreted and transmembrane 1
precursor
    TGGGACACCAGAGAAATAACAGAC (1681)
    CACGCTGGAGGTTTCAGGTGCAGAAC (1682)
    AGGCCAGAACCCAGTGTCAG (1683)
A68//NM_000096//CP//ceruloplasmin (ferroxidase)
    TGGATGCTCAGCTGTCAGAATC (1684)
    CATCTGAAAGCCGGTTTGCAAGCCT (1685)
    TGTTACACTCCTGGACCTGGAA (1686)
B13//NM_012258//HEY1//hairy/enhancer-of-split
related with YRPW motif 1
    CAATGCACTGAGCCCTTCAG (1687)
    CCCACGCAGGCTGCAAACCTTG (1688)
    TCCGTCCCCCAAGGTCTATAG (1689)
B14//NM_033197//MGC14597//von Ebner minor salivary
gland protein
    GGCTTCCTTCAATGGCATGT (1690)
    CAGCATTGACCGTCTGGAGTTTGACCT (1691)
    GTCACCCTTGATGGCAGGAT (1692)
A77//NM_003355//UCP2//uncoupling protein 2
    CCCTACTGCCACTGTGAAGTTTCT (1693)
    CACAGCTGCCTGCATCGCAGATCT (1694)
    AGCAGTATCCAGAGGAAAGGTGAT (1695)
A78//NM_012449//STEAP//six transmembrane
epithelial antigen of the prostate
    TGGAAAATGAAGCCTAGGAGAAAT (1696)
    TGCTGGTCTCTCCCGTGTCCTTATGC (1697)
    TCTGAAGGGCAGTCAAATTCATC (1698)
B21//“NM_016583, NM_130852”//LOC51297//LUNX
protein; PLUNC (palate lung and nasal epithelium
clone); tracheal epithelium enriched protein
    TGGCCACCGTCTCTATGTCA (1699)
    CTCGGCATAAAGCTCCAAGTGAATACGCC (1700)
    CCAGCCTCAACAGACTTGCA (1701)
B23//NM_006424//SLC34A2//“solute carrier family 34
(sodium phosphate), member 2”
    CACTGTTCCCTCGACTGCTAACT (1702)
    CTACAAGGAGAACATCGCCAAATGCCA (1703)
    AAGATCCGGGAGGTGGAAATT (1704)
A83//u46569//AQP5//aquaporin 5 (exon4)
    TTTCTGGGTAGGGCCCATC (1705)
    CTGGCTGCCATCCTTTACTTCTACCTGCTC (1706)
    ATGGCCACACGCTCACTCA (1707)
A84//AF030880//SLC26A4//“PDS(pendrin) mRNA, solute
carrier family 26, member 4”
    TTTGCCTCCTGAACTTCCACC (1708)
    CTTGTTCTCGGAGATGCTGGCTGCAT (1709)
    CCTACTGACACTGCAATAGCATAAGC (1710)
A89//x87159//SCNN1B//amiloride-sensitive sodium
channel
    ATTGATGAACGGAACCCCC (1711)
    CACCCCATGGTCCTTGATCTCTTTGGA (1712)
    TGCTGAGCTGCTTGTTAAGCC (1713)
A115//U70981//IL13RA2//“interleukin 13 receptor,
α2”
    TGCTCAGATGACGGAATTTGG (1714)
    TGAGTGGAGTGATAAACAATGCTGGGAAGG (1715)
    TGGTAGCCAGAAACGTAGCAAAG (1716)
Mouse genes;
A27//NM_019494//SCYB11//“small inducible cytokine
subfamily B (Cys-X-Cys), member 11 precursor”
    TGGCAGAGATCGAGAAAGCTTC (1717)
    ACCCGAGTAACGGCTGCGACAAAGTT (1718)
    TCCAGGCACCTTTGTCGTTT (1719)
A30//NM_019395//FBP1//“fructose-1,6-biphosphatase
(FBP1) gene, exon 7”
    CCTCTGAAGATGTGCAGGAGTTC (1720)
    CACAAAGCCAAGTGAAGGCCAGCC (1721)
    CAGAATGGAGTAGCGTCACTTGA (1722)
A32//NM_010743//IL1RL1//interleukin 1 receptor-
like 1
    TCCTAGGTGGCCAGAGTTGTG (1723)
    CCCAAGACCTCACTGATCACAACAGCA (1724)
    CACCCGGAGTAACACCATTATCA (1725)
A35//NM_009660//ALOX15//arachidonate 15-
lipoxygenase
    TACCCCACCGCCGATTT (1726)
    CACGCCCTTGGATCCCCCAATG (1727)
    CCCAGCATTTGGCCAGG (1728)
A36//x13335//ADAM8//a disintegrin and metallopro-
teinase domain 8 precursor
    GGCTCTCCAACCCCCTATTCTA (1729)
    AGACAGTTTCTACCAACCAGCCCCCAAG (1730)
    GCCTCTTTGGTTTCACTATGGG (1731)
A37//NM_0023137//diubiquitin//diubiquitin
    TGACAAGGAAACCACTATCCACC (1732)
    CCTGAAGGTGGTGAAGCCCAGTGATG (1733)
    CCAGAAACAAGGGCAGCTCT (1734)
A45//NM_010145//EPHX1//epoxide hydrolase 1
    CCTGGCTGCCTACATCTTAGAGAA (1735)
    CTGGACCAAGTCAGAATACCGTGAACTGGA (1736)
    TTAGTCAGCAGATCTTCCAGGGAG (1737)
A48//NM_007722//RDC1//G protein-coupled receptor
    TGGGAGCATCTTCTTCCTCG (1738)
    TGCATGAGCGTGGACCGCTATCTC (1739)
    GCCGGTGAAGTAGGTGATGG (1740)
A50//NM_008343//IGFBP3//insulin-like growth
factor-binding protein 3
    GCAGGCAGCCTAAGCACCTA (1741)
    CCTCCCAACCTGCTCCAGGAAACA (1742)
    TGCTCCTCCTCGGACTCACT (1743)
A51//NM_008344//IGFBP6//insulin-like growth
factor-binding protein 6
    GGAGAGCAAACCCCAAGGAG (1744)
    TGCCTCCCGCTCTCGTGACACAA (1745)
    TCTTCTGCCGGTCTCTGTGG (1746)
A52//NM_013650//S100A8//S100 calcium-binding
protein A8
    GAGTGTCCTCAGTTTGTGCAGAA (1747)
    CACCCACTTTTATCACCATCGCAAGGAA (1748)
    CTTGTGGCTGTCTTTGTGAGATG (1749)
E2//NM_007727//CNTN1//contactin 1
    CCCAGGAGGCCTGAGAATAGA (1750)
    TGGTTCCGACAATCACAGCCCTATCTCT (1751)
    GAATCGTCTTGGTCTGGATCGT (1752)
A64//NM_021384//cig5//vipirin
    GACAGCTTCGATGAGCAGGTT (1753)
    CCTTGACCACGGCCAATCAGAGCAT (1754)
    CTGCACCACCTCCTCAGCTT (1755)
A66//AF210700//SECTM1//secreted and transmembrane
1 precursor
    AAGGAGTCCAGGCCCAGC (1756)
    CAGATGCTCAGGACAAACACTCAGGGAACT (1757)
    TCCATGCAGCTTCCAGGAG (1758)
A72//NM_007752//CP//ceruloplasmin (ferroxidase)
    ACAGCAACAACCTGTGCCTACA (1759)
    TCAACCTGTTCCCTGCCACCCTAATTG (1760)
    TGCAACCCAGCTTTCAGATG (1761)
B18//NM_010423//HEY1//hairy/enhancer-of-split
related with YRPW motif 1
    CACTCTCAGTCTCACGGATTTCA (1762)
    CCAGTGTCGACCTGCGTAAGCGATC (1763)
    TTCACAGGCACCAAGCTACTTTC (1764)
B19//U46068//MGC14597//von Ebner minor salivary
gland protein
    CACCCTGACCAAGATCCTTGA (1765)
    TACACACTGCTGCCCAATGAGAATGGC (1766)
    ACCCTTGCTCACAGACCACAT (1767)
A81//NM_011671//UCP2//uncoupling protein 2
    GCATTGGCCTCTACGACTCTGT (1768)
    CCTGCATGCTCTGAGCCCTTGGTGTA (1769)
    GCCTGGAAGCGGACCTTTA (1770)
A82//NM_027399//STEAP//six transmembrane
epithelial antigen of the prostate
    AGTGACGATGTTACAAACCCAGAA (1771)
    TGCTCGTCTCTCCCGAGTCCTTAGTCG (1772)
    GAATTCCTGCGTGTGCTGAAG (1773)
B24//NM_011126//L0C51297//LUNXprotein; PLUNC
(palate lung and nasal epithelium clone); tracheal
epithelium enriched protein
    CAGCTTGCTCAATGGAGTCACT (1774)
    AGGACATACCTTGCCCTGGATCAGCT (1775)
    ACCAGGGTGACATCCAAACC (1776)
B26//NM_011402//SLC34A2//“solute carrier family 34
(sodium phosphate), member 2”
    CTCCAGCACCTCTTCCTCCA (1777)
    CCGAACCGTCAGCAATGAAGAAGCAA (1778)
    TGTTAGCGCCCATGATGATG (1779)
A98//AF087654//AQP5//aquaporin 5 (exon4)
    GAACCCAGCCCGATCTTTC (1780)
    CCCTGCGGTGGTCATGAATCGGT (1781)
    CCCAGAAGACCCAGTGAGAGG (1782)
A99//AF167411//SLC26A4//“PDS(pendrin) mRNA, solute
carrier family 26, member 4”
    GGTTCTTGCCTCCTGTCCTG (1783)
    CATCTGTGGGCCTGTTTTCGGACATG (1784)
    AATGGAAAAGGATGCAGCCA (1785)
A104//AF112186//SCNN1B//amiloride-sensitive sodium
channel
    TGGTCCTTATTGATGAGCGGA (1786)
    TGACCACCCGGTGGTTCTCAATTTGTT (1787)
    CGGGTTGCTGCTGTTGTG (1788)
A127//U65747//IL13RA2//“interleukin 13 receptor,
α2”
    ACACAGGGCCAGACTCAAAGAT (1789)
    AACCTGAACCCACATTGAGCCTCCATG (1790)
    GCACACACTTCTTTGTTCAGATCC (1791)
Genes whose expression levels tend to vary in both
humans and mice:
Human genes;
A2//NM_006705//GADD45G//“growth arrest and DNA
damage inducible, γ”
    CCCAGCATCACCCTCCCCGA (1792)
    CCCAGCATCACCCTCCCCGA (1793)
    GCGTCACCACGTCGATCAG (1794)
A20//d00632//GPX3//glutathione peroxidase 3
    GGACACATTAATATCACCCGGA (1795)
    ACAGCCTCATTCATGGTTTCACGTGC (1796)
    CCCGAGATTAGGAGTTGCTGTT (1797)
A53//NM_005168//ARHE//“ras homolog gene family,
member E”
    CCACAAAGCGGATTTCACACATGCC (1798)
    CCACAAAGCGGATTTCACACATGCC (1799)
    TCCTTTCGTAAGTCCGTAGCAACT (1800)
A67//NM_002305//LGALS1//β-galactosidase binding
lectin precursor
    TCCTGACGCTAAGAGCTTCGTGCTGAA (1801)
    TCCTGACGCTAAGAGCTTCGTGCTGAA (1802)
    AAGCGAGGGTTGAAGTGCA (1803)
C7//NM_005672//PSCA//prostate stem cell antigen
    AGGCACTGCCCTGCTGTGCTACTCCT (1804)
    AGGCACTGCCCTGCTGTGCTACTCCT (1805)
    GCTCACCTGGGCTTTGCA (1806)
A93//NM_002659//UTPR//urokinase-type plasminogen
receptor
    ACACCACCAAATGCAACGAGG (1807)
    TTGAAAATCTGCCGCAGAATGGCCG (1808)
    TCCCCTTGCAGCTGTAACACTG (1809)
A96//j05070//MMP9//type IV collagenase
    ACCTCGAACTTTGACAGCGAC (1810)
    TGCCCGGACCAAGGATACAGTTTGTT (1811)
    GAGGAATGATCTAAGCCCAGC (1812)
A120//S78825//ID1//“inhibitor of DNA-binding 1,
dominant negative helix-loop-helix protein”
    ATGAACGGCTGTTACTCACG (1813)
    TGGAGATTCTCCAGCACGTCATCGACT (1814)
    GATTCCGAGTTCAGCTCCAA (1815)
Mouse genes;
A28//NM_011817//GADD45G//“growth arrest and DNA-
damage-inducible, γ”
    GCATTGCATCCTCATTTCGAAT (1816)
    TGAGGACACATGGAAGGACCCTGCC (1817)
    CCTCGCAGAACAAACTGAGCTT (1818)
A46//u13705//GPX3//glutathione peroxidase 3
    AGAAGAACTTGGGCCATTTGG (1819)
    TTCTGGGCTTCCCTTCCAACCAATTTG (1820)
    TCTCGCCTGGCTCCTGTTT (1821)
A60//NM_028810//ARHE//“ras homolog gene family,
member E”
    GGGATGGTGCCCCTAGACTAG (1822)
    CTGTCGTCTGGTGCCACTTCCTTCAA (1823)
    GGGTTTTGCCAGAACAGCATT (1824)
A71//NM_008495//LGALS1//β-galactosidase-binding
lectin precursor
    ACAGCAACAACCTGTGCCTACA (1825)
    CCCATGGAGACGCCAACACCATTG (1826)
    CCCATCTTCCTTGGTGTTACA (1827)
C8//AW209486//PSCA//prostate stem cell antigen
    CATCCCATCTCAGCCTTTACCA (1828)
    CCTACTCTCCAGGGCCTGAGCCAGTG (1829)
    GCCCTACCAAGTTTTGCTCAGA (1830)
A108//NM_011113//UTPR//urokinase-type plasminogen
receptor
    CAATGGTGGCCCAGTTCTG (1831)
    AGCTTTCCACCGAATGGCTTCCAGTGT (1832)
    GGGTATTGTTCCCCTCACAGC (1833)
A111//NM_013599//MMP9//type IV collagenase
    CCATGCACTGGGCTTAGATCA (1834)
    AGCGTGCCGGAAGCGCTCAT (1835)
    TCGAGGTAGCTATACAGCGGG (1836)
A132//U43884//ID1//“inhibitor of DNA-binding 1,
dominant negative helix-loop-helix protein”
    CGACATGAACGGCTGCTACTC (1837)
    CGCCTCAAGGAGCTGGTGCCC (1838)
    CTTGCTCACTTTGCGGTTCTG (1839)
Genes whose expression levels varied in humans:
Human genes;
A3//NM_000625//NOS2A//“nitric oxide synthase 2A
(inducible, hepatocytes)”
    ACCCTGAGCTCTTCGAAATCC (1840)
    TTAGCTCCAGTTCCCGAAACC (1841)
    TTAGCTCCAGTTCCCGAAACC (1842)
A5//NM_005101//ISG15//“interferon-stimulated
protein, 15 kDa”
    GGGACCTGACGGTGAAGATG (1843)
    CTGACACCGACATGGAGCTGCTCAG (1844)
    GCCAATCTTCTGGGTGATCTG (1845)
A8//NM_003956//CH25H//cholesterol 25-hydroxylase
    ACGTGGTCAACATCTGGCTTTC (1846)
    TCCGGCTACAACTTCCCTTGGTCCA (1847)
    GGAGCGAAGTTGCAGTTAAAGTG (1848)
A12//U19557//SERPINB4 (SCCA2) //“serine (or
cysteine) proteinase inhibitor, clade B
(ovalbumin), member 4”
    AGCCACGGTCTCTCAG (1849)
    AAGGCCTTTGTGGAGGTCACTGAGGAGGGA (1850)
    GCAGCTGCAGCTTCCA (1851)
A13//NM_002575//SERPINB2//“serine (or cysteine)
proteinase inhibitor, clade B (ovalbumin), member
2”
    ATGGTCCTGGTGAATGCTGTCTA (1852)
    TGTAAACTCGGCTCAGCGCACACCT (1853)
    GCTTTTCACGCAAGTACATCATCT (1854)
A15//NM_000433//NCF2//neutrophil cytosolic factor
2
    TAGCATTGGCCACGAGCAT (1855)
    TGAGCCCAGACATTCCAAAATCGACA (1856)
    GATCACCACTGGCTCATATAGCTTCT (1857)
A23//NM_000435//NOTCH3//Notch homolog 3
    ACTTTGCCAACCGTGAGATCA (1858)
    TCCTGGTGCAGTCTCTCCTGGGCTA (1859)
    ATCCAGCAAGCGCACGAT (1860)
B1//NM_022168//MDA5//melanoma differentiation
associated protein-5
    GACCCCAGAATTCAAGGAACTTT (1861)
    CAAGCCTGGCCACATTTGCAGATGA (1862)
    GCCTTTGTGCACCATCATTGT (1863)
B2//NM_052942//GBP5//guanylate binding protein 5
    AAAATTGGCTGGCAGAGCAA (1864)
    CTGCACAGCTCAGCACAACATTCCAA (1865)
    CGTGCTGGAGCTCACTGAGA (1866)
B3//NM_018584//PRO1489//hypothetical protein
PRO1489
    AGAGGAGCCCAGAGCCTTCT (1867)
    TCATCTGTCTCCCGGCCTGATACCA (1868)
    CCCACGATGAAATCAACAACCT (1869)
C2//NM_032323//MGC13102//hypothetical protein
MGC13102
    CCAGTCGGTCCAGCTCTTTATT (1870)
    TCAACCTGGCCGTGCTTTCCACTT (1871)
    TCAACCTGGCCGTGCTTTCCACTT (1872)
A54//NM_003238//TGFB2/“transforming growth factor,
β2”
    CCTGAACAACGGATTGAGCTATATC (1873)
    CCCAGCGCTACATCGACAGCAAAGT (1874)
    AACAGCATCAGTTACATCGAAGGA (1875)
A55//NM_001539//DNAJA1//“DnaJ (Hsp40) homolog,
subfamily A, member 1”
    CCAAGTAGAACTGGTGGACTTTGA (1876)
    CCAAATCAGGAAAGACGGCGCCA (1877)
    CATCCTCATATGCTTCTCCATTGT (1878)
A56//NM_003032//SIAT1//“sialyltransferase 1 (β-
galactoside α-2, 6-sialytransferase)”
    ACGCAGTCCTGAGGTTTAATGG (1879)
    CACCCACAGCCAACTTCCAACAAGATGT (1880)
    GCACAAAAACTACCATTCGCCT (1881)
B9//NM_013324//CISH//cytokine-inducible SH2-
containing protein
    TGTGCATAGCCAAGACCTTCTC (1882)
    CCAATACCAGCCAGATTCCCGAAGGTA (1883)
    CTGGCATCTTCTGCAGGTGTT (1884)
A69//NM_006408//AGR2//anterior gradient 2 homolog
(Xenepus laevis)
    CAGTTTGTCCTCCTCAATCTGGTT (1885)
    TGTCCCCAGGATTATGTTTGTTGACCCA (1886)
    TTCCAGTGATATCGGCTCTAACTGT (1887)
A70//NM_002443 NM_138634//MSMB//“microseminopro-
tein, β-, isoform a, b”
    ACCTGTCTATAAGGAGTCCTGCTTATC (1888)
    CAATGAATGTTCTCCTGGGCAGCGTT (1889)
    AAGTCACGAAGGTGGCAAAGAT (1890)
B11//NM_024539//FLJ23516//hypothetical protein
FLJ23516
    CTGCTCGAAGGCTACGGAAT (1891)
    TCTGCCTTTAATTGCCTCTGCTTCCTG (1892)
    TGCGTAGTTGAAGCCTTCCA (1893)
B15//NM_002247//KCNMA1//“potassium large
conductance calcium-activated channel, subfamily
M, α member 1”
    CCGTGCCAGCAACTTTCATT (1894)
    CCAAAGTGTCCATATTGCCTGGTACGCC (1895)
    CCCTTAAATCAGCCCGACTTAA (1896)
C5//NM_018050//FLJ10298//hypothetical protein
FLJ10298
    CGAGGAAGCCTGTCCATTGA (1897)
    TGACCAGAAATTTGCCAAGCCAAGAGTT (1898)
    GCTTGTGAAAATTGGCCATGT (1899)
A75//NM_003246//THBS1//throbospondin 1
    TCCAGCATGGTCCTGGAACT (1900)
    TCTTCAGTCACTTTGCGGATGCTGTCCT (1901)
    TGAACTCCGTTGTGATAGCATAGG (1902)
A76//NM_005688//ABCC5//“ATP-binding cassette, sub-
family C, member 5”
    GGACACTGCACAGCATCGAT (1903)
    CCGCAGATTCCAACCAGTTTACCCTCTT (1904)
    CGAAGGTTCCACTGATTGCAA (1905)
E3//NM_016354//SLC21A12//“solute carrier family 21
(organic anion transporter), member 12”
    GCGTCACCTACCTGGATGAGA (1906)
    TACATTGCCATCTTCTACACAGCGGCC (1907)
    GCCCATTTCCGTGTAGATATTCA (1908)
E4//NM_012434//SLC17A5//“solute carrier family 17
(anion/sugar transporter), member 5”
    TGCCACTATTCCAGGAATGGTT (1909)
    CACGGTTTGCCATTCTCCAACAGTGTTA (1910)
    CTTCACCTTTGGCGAATAGTGTAA (1911)
A87//x52947//GJA1//“cardiac gap junction protein,
connexin 43”
    GGTTACTGGCGACAGAAACAATTC (1912)
    CGCAATTACAACAAGCAAGCAAGTGAGC (1913)
    TGCCCCATTCGATTTTGTTC (1914)
A90//d28137//BST2//BST2
    CAGTGATGGAGTGTCGCAATG (1915)
    CATCTCCTGCAACAAGAGCTGACCGA (1916)
    CACATCCTGAAAGCCCTTCTG (1917)
A94//j04164//IFI9-27//interferon-inducible
protein9-27
    CCTCTTCTTGAACTGGTGCTGT (1918)
    TGGGCTTCATAGCATTCGCCTACTCC (1919)
    CCATCTTCCTGTCCCTAGACTTC (1920)
A97//m24283//ICAM1//major group rhinovirus
receptor (ICAM1)
    GCTGACGTGTGCAGTAATACTGG (1921)
    CAGACAGTGACCATCTACAGCTTTCCGG (1922)
    TTCTGAGACCTCTGGCTTCGT (1923)
A113//D13666//OSF-2//osteoblast specific factor 2
(fasciclin I-like)
    AGCAAACCACCTTCACGGATC (1924)
    AATTAGGCTTGGCATCTGCTCTGAGGCC (1925)
    GGTGCCAGCAAAGTGTATTCTCC (1926)
A114//D31784//CDH-6//“cadherin 6, type 2
preproprotein”
    CGCAGTTCTGTAGTTGAGTTTCAAGG (1927)
    TTAGCAGGGTTGATGTGGAGCGTGAAG (1928)
    ACCAAGAACAGAATGCCCAGG (1929)
A116//U21049//DD96//“epithelial protein
upregulated in carcinoma, membrane associate”
    GCCTTTGCAGTCAACCACTTCTG (1930)
    ATGATCCTGACCGTCGGAAACAAGGC (1931)
    TCTGTTCCCACCAGGACTCCAT (1932)
A117//X87212//CTSC//cathepsin C
    TCTCAGACCCCAATCCTAAGCC (1933)
    TCTTGTAGCCAGTATGCTCAAGGCTGTGAA (1934)
    CTGCAATAAGGTATGGGAAGCC (1935)
A118//U17077//BENE//BENE protein
    TGCCCGAGCTGATATTTGG (1936)
    TAGCCGCCACCCACATAGTATACCCCTT (1937)
    CATACATCACCCATCCTTGCAG (1938)
A121//AI979079//FLJ10261//hypothetical protein
FLJ10261
    TTTGTCACTGAGCTCCGAAGG (1939)
    TAGCTGTCAGAGCCAAAGACATCGGAATCT (1940)
    TCCCAATGCCTCTGAGGATATT (1941)
A122//M87434//OAS2//2′-5′-oligoadenylate
synthetase 2 (69-71 kD)
    CATCAGGAACATCCTGCTGCA (1942)
    CAGCTCCAATCAGCGAGGCCAGTAATCT (1943)
    CACATTATTGGTTGGGTCAACTGG (1944)
A123//AB032953//Odz2//“Odd Oz/ten-m homolog 2
(Drosophila, mouse)”
    AGGCATGGTCAATGCCAGGT (1945)
    TCATGACAACAGCTTCCGCATCGCAA (1946)
    AGTCTCACTTATGACGGGCTTGATG (1947)
A124//X82693//E48//“lymphocyte antigen 6 complex,
locus D”
    AAGCATTCTGTGGTCTGCCC (1948)
    CTCGCTTCTGCAAGACCACGAACACA (1949)
    TTCACCAGATTCCCCCTCAGAG (1950)
A137//AF061812//KRT16//“keratin type 16 gene, exon
8”
    CACCATTGAGAATGCGCAG (1951)
    TTTTGCAGATTGACAATGCCAGGCTG (1952)
    ACTTGGTCCTGAAGTCATCGG (1953)
Mouse genes;
A29//m84373//NOS2A//“nitric oxide synthase 2A
(inducible, hepatocytes)”
    TGACGGCAAACATGACTTCAG (1954)
    AATTCACAGCTCATCCGGTACGCTGG (1955)
    GCCATCGGGCATCTGGTA (1956)
A38//NM_009126//SERPINB4 (SCCA2)//“serine (or
cysteine) proteinase inhibitor, clade B
(ovalbumin), member 4”
    ATGACCTCCCAATTCCATTGG (1957)
    ACATGGGAATGGTCGATGCCTTTGA (1958)
    ACCAGAGAAGTCAGCCTTCTGTG (1959)
A39//NM_011111//SERPINB2//“serine (or cysteine)
proteinase inhibitor, clade B (ovalbumin), member
2”
    CACATGAGGTTTTGTAGCATGAACT (1960)
    AGCCTCAGAATTGCATCTTCAAGTGCCA (1961)
    GCACTGAAGACTGCTATACAATTGC (1962)
A41//NM_010877//NCF2//neutrophil cytosolic factor
2
    ACCACCTCCTAATTCTAGCCCC (1963)
    AGTTGTCACCAGGTCACAAGCAAAAAGAGC (1964)
    CATGTAAGGCATAGGCACGCT (1965)
B5//AA959954//MDA5//melanoma differentiation as-
sociated protein-5
    GAGAGCAAATGTGGACTCAGCTAGT (1966)
    TGTAGCCCGAGATCACCCACAGAGAAC (1967)
    AATGCCCATGAGGTATTGTCCTA (1968)
B6//NM_010259//GBP5//guanylate binding protein 5
    GCAGCAAATAGAGCATTGGC (1969)
    AGCATGAGATGCTGATGGAACAGAAGGA (1970)
    TGCTCCATCTTCTCAGTCAGC (1971)
C4//NM_024246//MGC13102//hypothetical protein
MGC13102
    GGGCTGGCGAGATATTGAAC (1972)
    CCATTCAAAGAGGATGCCAACCTGCTC (1973)
    CGCTCGATGCACTGTAGATCA (1974)
A61//NM_009367//TGFB2//“transforming growth
factor, β2”
    TTACCCTAAGCGAGAAAGTGCAA (1975)
    CGCAGCCAACGCGCCCA (1976)
    CCTTAACCCCTGTGGAACAACA (1977)
A62//NM_008298//DNAJA1//“DnaJ (Hsp40) homolog,
subfamily A, member 1”
    TGTCTAGTTATATGAAGTGAACCAATTGTG (1978)
    TGCCTTTGCATTGTATTGCCTCAGCC (1979)
    CGAAATGTATTATGCCACCTTCTAGTAA (1980)
A63//D16106//SIAT1//“sialyltransferase 1 (β-
galactoside α-2, 6-sialytransferase)”
    GGGTTACCTGCCCAAAGAGAC (1981)
    TTCAGAACCAAGGCTGGGCCTTGG (1982)
    CAGAAGACACGACGGCACAC (1983)
B10//NM_009895//CISH//cytokine-inducible SH2-
containing protein
    CAGTGCCCGCAGCTTACAA (1984)
    CTGTGTCGGCTAGTCATCAACCGTCTGG (1985)
    TCGGAGGTAGTCGGCCATAC (1986)
B16//NM_023270//FLJ23516//hypothetical protein
FLJ23516
    TCGCAGTGAGACTGCATCATC (1987)
    CTTCAGTACAAGGAGCAGATGAGCCACCTC (1988)
    TTTGCTGACTGCGCATGTTC (1989)
B20//NM_010610//KCNMA1//“potassium large con-
ductance calcium-activated channel, subfamily M,
α member 1”
    TGGTAACGTGGACACCCTTGA (1990)
    TAATGATTGCTCCACCAGTTTCCGTGC (1991)
    GTTGGCGGCTGCTCATCTT (1992)
C6//NM_026345//FLJ10298//hypothetical protein
FLJ10298
    GTCCTCTGCATGCTAGGCAAG (1993)
    AGCCATCCCTCAGTCCAACCACTTTCTG (1994)
    ACCCTTCTTCTCTTCCTCTTTAAAAAA (1995)
A79//NM_011580//THBS1//throbospondin 1
    GGTGCTGCAGAATGTGAGGTT (1996)
    AGGCTGCTCCAGCTCTACCAACGTCCT (1997)
    AACCGTTCACCACGTTGTTGT (1998)
A80//NM_013790//ABCC5//“ATP-binding cassette, sub-
family C, member 5”
    TGGAGGCTGCATCAAGATTG (1999)
    TCAGTGGCACTGTCAGATCAAACCTGG (2000)
    TCTTCCGTGTACTGGTTGAAAGG (2001)
A102//M61896//GJA1//“cardiac gap junction protein,
connexin 43”
    CGAGCAAAACTGGGCGAA (2002)
    ACAGCGCAGAGCAAAATCGAATGGG (2003)
    ATGGTGCTTCCGGCCTG (2004)
A109//AK003407//IFI9-27//interferon-inducible
protein9-27
    AGGTGTCGGTGCCTGACC (2005)
    TGGTCTGGTCCCTGTTCAATACACTCTTCA (2006)
    GCCCAGGCAGCAGAAGTTC (2007)
A112//m31585//ICAM1//major group rhinovirus
receptor (ICAM1)
    AGTCCGCTGTGCTTTGAGAAC (2008)
    TGGCACCGTGCAGTCGTCCG (2009)
    CCGGAAACGAATACACGGTG (2010)
A125//D13664//OSF-2//osteoblast specific factor 2
(fasciclin I-like)
    TAGCCCAATTAGGCTTGGCATCC (2011)
    TAGCACCTGTGAACAATGCGTTCTCTGATG (2012)
    TAAGAAGGCGTTGGTCCATGCT (2013)
A126//D82029//CDH-6//“cadherin 6, type 2
preproprotein”
    TTTAAGACCCCCGAGTCCTCTC (2014)
    CCAATTGGCAGGATCAAAGCCAGTGA (2015)
    CTCCGCATTTTCTCCCACATC (2016)
A128//AW01791//DD96//“epithelial protein up-
regulated in carcinoma, membrane associate”
    GATGCAAGGCCTCATTGCTG (2017)
    CGCTGTGTTCTTGGTCCTTGTTGCAA (2018)
    AGAAGTGGTTGACGGCGAAGAC (2019)
A129//U74683//CTSC//cathepsin C
    TCTCAGACACCAATCCTGAGTC (2020)
    TCTTGCAGCCCCTATGCCCAAGGTTGTGAT (2021)
    CTGCAATGAGGTATGGGAATCC (2022)
A130//BC012256//BENE//BENE protein
    CGGGTTCTGGGTGTGGACT (2023)
    CTGCTACACACGTCGCATACCCCTTG (2024)
    CATACAGCACCCATCCCTGC (2025)
A133//BC006062//FLJ10261//hypothetical protein
FLJ10261
    CGGCATCTGGTATAACATCCTCA (2026)
    AGGTGTTGGGAAGCTGGCTGTCATCA (2027)
    GATGAAGTCAGACGTGAAGGAGATC (2028)
A135//NM_011856//Odz2//“odd Oz/ten-m homolog 2
(Drosophila, mouse)”
    GAATGATCAACGCCAGGTTTG (2029)
    ACCTATCACGACAATAGCTTCCGCATTGC (2030)
    CGCTAATGACGGGTTTGATGC (2031)
A136//X53782//E48//“lymphocyte antigen 6 complex,
locus D”
    GGTCTGCCCGTCCAACTTC (2032)
    TTCTGCAAAACCGTCACCTCAGTGGAG (2033)
    TCACCAGGTTCCCATTCAGAG (2034)
A138//AF053235//KRT16//“keratin type 16 gene, exon
8”
    TCAAGACCATTGAGGACCTGA (2035)
    ACACGATCACCTACTCACTCCTCAAGCA (2036)
    AGCCTGGCATTGTCAATCTG (2037)
Genes whose expression levels tend to vary in
humans:
Human genes;
A16//NM_002997//SDC1//syndecan 1
    TGGTGGGTTTCATGCTGTACC (2038)
    TGAAGAAGAAGGACGAAGGCAGCT (2039)
    GCATAGAATTCCTCCTGTTTGGTG (2040)
A21//NM_024090//LCE//hypothetical protein MGC5487
    TCTCTGACCCTTGCAGTCTTCA (2041)
    CATTTTGATGACCAAAGGCCTGAAGCA (2042)
    GAATTTGCTGACAGGTCCATTG (2043)
A88//u17986//SLC6A8//SLC6A8
    TCCTACTACTTCCGTTTCCAAAGG (2044)
    CCTCTGTTGTGCCCTCTGCTTTGTCAT (2045)
    CTCACATCAGTCACCATGGAGAG (2046)
Mouse genes;
A42//NM_011519//SDC1//syndecan 1
    GGCTTTCATGCTGTACCGGAT (2047)
    TGGAGGAGCCCAAACAAGCCAATG (2048)
    AGGCGTAGAACTCCTCCTGCTT (2049)
A47//NM_130450//LCE//hypothetical protein MGC5487
    AGCTGTACTTTGATTGCAGGTCAA (2050)
    CTCACCAGTTGTCCATGTCCACCCAC (2051)
    GGACCAATCAGCTAGGACAACTTG (2052)
Genes whose expression levels varied in mice:
Human genes;
A17//NM_000667//ADH1A//“class I alcohol dehydro-
genase, α subunit”
    TTTCCCTTGTGGCAGTCTTCA (2053)
    CCTCTACCCTACATGATCTGGAGCAACAGC (2054)
    TTGGAAAGCCCCCAAATGT (2055)
A58//NM_014375//FETUB//fetuin B
    CCGAGTCTCTTGCGAAATACAA (2056)
    ACAACCCACTGGCTAGAAGCCCTGGT (2057)
    CGGAGGACTGAAGTGAACAGCT (2058)
B22//NM_014585//SLC11A3//“solute carrier family 11
(proton-coupled divalent metal ion transporters),
member 3”
    AACCGCCAGAGAGGATGCT (2059)
    TGGATCCTTGGCCGACTACCTGACCT (2060)
    CACATCCGATCTCCCCAAGTA (2061)
A119//V01512//c-fos//cellular oncogene c-fos (com-
plete sequence)
    GGCAAGGTGGAACAGTTATCTCC (2062)
    TCCGAAGGGAAAGGAATAAGATGGCTGCA (2063)
    AGTGTATCAGTCAGCTCCCTCCTC (2064)
Mouse genes;
A43//NM_007409//ADH1A//“class I alcohol dehydro-
genase, α subunit”
    TGTGGTGTAAGCGTCGTCGTA (2065)
    CCAATGCCCAGAACCTCTCCATGAAC (2066)
    CGCCAAATATTGCTCCCTTC (2067)
A44//NM_008030//FM03//Flavin-containing
Monooxygenase 3
    CTTGCAGCCCCTACCAGTTC (2068)
    CCCGGAACGCCATCCTAACACAGTG (2069)
    TGACGACACGCGTCTTCATAG (2070)
A65//NM_021564//FETUB//fetuin B
    CTCGTCAAAGTCACCAAGGCTAT (2071)
    CCATGTACCAAATCCCAGGCCAGCT (2072)
    AATACCAACGGGCTCAGAGTCA (2073)
B25//NM_016917//SLC11A3//“solute carrier family 11
(proton-coupled divalent metal ion transporters),
member 3”
    CTATTCTCAGGACTAGCCCAGCTT (2074)
    TCCAGGCATGAATACGGAGATCACACA (2075)
    CCTAGAACGGATATCTTCAAATGGA (2076)
A131//V00727//c-fos//cellular oncogene c-fos (com-
plete sequence)
    CCTGAAGAGGAAGAGAAACGGAG (2077)
    CGAAGGGAACGGAATAAGATGGCTGC (2078)
    CGATTCCGGCACTTGGC (2079)
```

[0627] The total RNAs extracted by the method described above were treated with DNase (Nippon Gene Co., Ltd.). Then, the cDNAs prepared by reverse transcription were used as templates. The primer used was random hexamer (GIBCO BRL). A plasmid clone for each gene, which contained the nucleotide sequence region amplified with the pair of primers, was prepared for a standard curve to determine the copy number. A dilution series of the plasmid was used as templates in the PCR assay. The composition of the reaction solution used to monitor PCR amplification was the same as that shown in Table 39.

[0628] Furthermore, similar quantitative analyses for the β-actin gene and the glyceraldehyde-3-phosphate dehydrogenase (GAPDH) gene as internal standards for correction were carried out to correct the difference of cDNA concentration in a sample. The copy number of the gene of interest was determined by correcting based on the determined copy numbers for the genes.

[0629] The nucleotide sequences of primers and probes used in the assays for human and mouse β-actin, and human and mouse GAPDH, are the same as shown in Example 6 (human: SEQ ID NOs: 7 to 12) and Example 9 (mouse: SEQ ID NOs: 18 to 23). The expression levels (copy/ng RNA) of the respective genes corrected with the level of β-actin are shown in FIGS. 7 to 31 (altered in both human and mouse) and FIGS. 32 to 69 (altered in human). In the OVA-administered group, the respective genes showed significant variations in expression levels. Specifically, the expression levels of genes belonging to groups (A) and (B) were confirmed to be increased and decreased, respectively.

6. Determination of the Localization of Each mRNA in the Lung of OVA antigen-exposed bronchial Hypersensitivity Model by in situ Hybridization (Hereinafter Referred to as “ISH”)

[0630] A32/IL-1R-1, A36/ADAM 8, A37/diubiqutin, A42/SDC1, A50/IGFBP3, and A129/CTSC were analyzed for the localization pattern. After perfusion fixation with 10% buffered neutral formalin, the pulmonary tissues were removed from three mice from the naive group and each of the other three groups (S-Sal group, Pred group and S-OVA group) 24 hours after the final exposure to the antigen. The tissues were fixed with 10% buffered neutral formalin, and then embedded in paraffin to prepare tissue blocks.

[0631] All paraffin blocks from the mouse lung samples were sliced into 3 μm sections. Then, the sections were treated with hematoxylin for nuclear staining. Among them, sections exhibiting good tissue morphology were selected from a single individual each of the S-Sal group and S-OVA group for carrying out ISH. The nucleotide sequences of the ISH probes are shown in the following SEQ ID NOs:
[0632] CTSC (SEQ ID NO: 2080, 2081);
[0633] IL-1 receptor 1 (SEQ ID NO: 2082);
[0634] ADAM8 (SEQ ID NO: 2083);
[0635] Diubiquitin (SEQ ID NO: 2084);
[0636] SDC1 (SEQ ID NO: 2085); and
[0637] IGFBP3 (SEQ ID NO: 2086).

[0638] The paraffin sections of mouse lung tissues from the S-Sal group and the S-OVA group were rehydrated by deparaffinization (washed with water after treatment with xylene, 100%, 90%, 80%, and 70% alcohol) Then, the sections were treated with the ISH probe described above. After the staining, the sections were treated for nuclear staining. The conditions used for the ISH experiments are described below. The ISH result is shown in Table 158.

[0639] Probe concentration: 250 ng/ml

[0640] Hybridization temperature: 60° C.

[0641] Duration of hybridization: 6 hours

[0642] Post-hybridization wash: 0.1×SSC/70° C./6 minutes/3 times

[0643] Coloring reagents: NBT/BCIP

[0644] Duration of color development: 7 hours

TABLE 114

| | | A32; IL-1R-1 | | | A36; ADAM 8 | | | A37; diubiqutin | | | A42; SDC1 | | |
|---|---|---|---|---|---|---|---|---|---|---|---|---|---|
| site | constituting cell | Naïve | S-Sal | S-OVA | Naïve | S-Sal | S-OVA | Naïve | S-Sal | S-OVA | Naïve | S-Sal | S-OVA |
| bronchial | epithelial cell | − | − | − | − | − | − | − | − | − | − | − | − |
| branch | goblet cell | − | − | − | − | − | ++ | + | + | ++ | +/− | + | + |
| | lymphocyte | − | − | + | − | − | − | − | − | − | − | − | − |
| | macrophage | − | − | ++ | − | − | − | − | − | − | − | − | − |
| | smooth muscle cell | − | − | − | − | − | − | − | − | − | − | − | − |
| bronchiole | epithelial cell | − | − | − | − | − | − | − | − | − | − | − | − |
| | Clara cell | − | − | − | − | − | − | − | + | + | − | + | + |
| | goblet cell | − | − | − | − | − | − | − | + | + | − | + | + |
| | lymphocyte | − | − | + | − | − | − | − | − | − | − | − | − |
| | macrophage | − | − | ++ | − | − | − | − | − | − | − | − | − |
| | smooth muscle cell | − | − | − | − | − | − | − | − | − | − | − | − |
| alveolus | type I alveolar epithelial cell | − | − | − | − | − | − | − | − | − | − | − | − |
| (alveolar | type II alveolar epithelial cell | − | − | − | − | − | ++ | − | − | ++ | − | − | − |
| duct) | macrophage | − | − | ++ | − | − | − | − | − | − | − | − | − |
| | alveolar macrophage | − | − | − | − | − | − | − | − | − | − | − | − |
| | endothelial cell | − | − | − | − | − | − | − | − | − | − | − | − |
| | fibroblast | − | − | − | − | − | − | − | − | − | − | − | − |
| | invasive cell | X | X | − | X | X | − | X | X | ++* | X | X | ++* |

| | | A50;IGFBP3 | | | A129; CTSC | | |
|---|---|---|---|---|---|---|---|
| site | constituting cell | Naïve | S-Sal | S-OVA | Naïve | S-Sal | S-OVA |
| bronchial | epithelial cell | − | − | − | ND | − | − |
| branch | goblet cell | + | + | ++ | ND | − | − |
| | lymphocyte | − | − | − | ND | − | − |
| | macrophage | − | − | − | ND | − | + |
| | smooth muscle cell | − | − | − | ND | − | − |
| bronchiole | epithelial cell | − | − | − | ND | − | − |
| | Clara cell | − | − | − | ND | − | − |
| | goblet cell | − | − | − | ND | − | − |
| | lymphocyte | − | − | − | ND | − | − |
| | macrophage | − | − | − | ND | − | + |
| | smooth muscle cell | − | − | − | ND | − | − |
| alveolus | type I alveolar epithelial cell | − | − | − | ND | − | − |
| (alveolar | type II alveolar epithelial cell | + | + | ++ | ND | − | − |
| duct) | macrophage | − | − | − | ND | − | + |
| | alveolar macrophage | − | − | − | ND | − | + |
| | endothelial cell | − | − | − | ND | − | − |
| | fibroblast | − | − | − | ND | − | − |
| | invasive cell | X | X | ++* | ND | X | − |

X: invasive cell
*: only plasma cells were stained

[0645] While this invention has been particularly shown and described with references to preferred embodiments thereof, it will be understood by those skilled in the art that various changes in form and details may be made therein without departing from the scope of the invention encompassed by the appended claims.

1. A method of testing for bronchial asthma or chronic obstructive pulmonary disease, which comprises the steps of:
(1) determining the expression level of a marker gene in a biological sample from a subject;
(2) comparing the expression level determined in step (1) with the expression level of the marker gene in a biological sample from a healthy subject; and
(3) judging the subject to have bronchial asthma or chronic obstructive pulmonary disease when the result of the comparison in step (2) indicates that (i) the expression level of the marker gene in the subject is higher than that in the control when the marker gene is a gene according to (a) or (ii) when the expression level of the marker gene in the subject is lower than that in the control when said marker gene is a gene according to (b);
wherein the marker gene is any one selected from the group according to (a) or (b):
(a) a group of genes whose expression levels increase when respiratory epithelial cells are stimulated with interleukin-13, and comprise any one of the nucleotide sequences of SEQ ID NOs: 25 to 310;
(b) a group of genes whose expression levels decrease when respiratory epithelial cells are stimulated with interleukin-13, and comprise any one of the nucleotide sequences of SEQ ID NOs: 311 to 547.

2. The testing method according to claim 1, wherein the biological sample is a respiratory epithelial cell.

3. The testing method according to claim 1, wherein the gene expression level is measured by PCR analysis of the cDNA.

4. The testing method according to claim 1, wherein the gene expression level is measured by detecting the protein encoded by the marker gene.

5. A reagent for testing for bronchial asthma or chronic obstructive pulmonary disease, wherein the reagent comprises a polynucleotide comprising the nucleotide sequence of a marker gene, or an oligonucleotide having at least 15 nucleotides and comprising a nucleotide sequence complementary to the complementary strand of the nucleotide sequence of the marker gene, and wherein, the marker gene is any one selected from the group according to (a) or (b) in claim 1.

6. A reagent for testing for bronchial asthma or chronic obstructive pulmonary disease, wherein the reagent comprises an antibody that recognizes a protein encoded by a marker gene, and wherein the marker gene is any one selected from the group according to (a) or (b) in claim 1.

7. A method of screening for a therapeutic agent for bronchial asthma or chronic obstructive pulmonary disease, wherein the marker gene is any one selected from the group according to (a) or (b) in claim 1, and wherein the method comprises the steps of:
(1) contacting a candidate compound with a cell expressing the marker gene;
(2) measuring the expression level of said gene; and
(3) selecting a compound that decreases the expression level of a marker gene belonging to group (a) or increases the expression level of a marker gene belonging to group (b), as compared to that in a control with which the compound has not been contacted.

8. The method according to claim 7, wherein the cell is a respiratory epithelial cell or a goblet cell.

9. The method according to claim 8, which comprises the step of culturing the respiratory epithelial cells under the condition in which culture medium is removed from the apical side of said cells and the culture medium is supplied from the basolateral side of the cells.

10. A kit for screening for a candidate compound for a therapeutic agent to treat bronchial asthma or chronic obstructive pulmonary disease, wherein the kit comprises (i) a polynucleotide comprising the nucleotide sequence of a marker gene, or an oligonucleotide having at least 15 nucleotides and comprising a nucleotide sequence that is complementary to the complementary strand of the polynucleotide, and (ii) a cell expressing the marker gene, and wherein the marker gene is any one selected from the group according to (a) or (b) in claim 1.

11. A kit for screening for a candidate compound for a therapeutic agent to treat bronchial asthma or chronic obstructive pulmonary disease, wherein the kit comprises (i) an antibody that recognize a protein encoded by a marker gene, and (ii) a cell expressing the marker gene, wherein the marker gene is selected from the group according to (a) or (b) in claim 1.

12. The kit according to claim 10, which further comprises a cell-supporting material to culture respiratory epithelial cells under conditions in which the culture medium is supplied from the basolateral side of the cells.

13. The kit according to claim 12, which further comprises respiratory epithelial cells.

14. An animal model for bronchial asthma or chronic obstructive pulmonary disease, wherein the animal is a transgenic nonhuman vertebrate wherein the expression level of a marker gene, or a gene functionally equivalent to the marker gene, has been increased in the respiratory tissue, wherein the marker gene is any one selected from the group according to (a) in claim 1 or the following (A):
(A) a group of genes whose expression levels increase in the lung of an animal model for bronchial hypersensitivity induced by an exposure to the ovalbumin antigen, wherein the genes comprise any one of the nucleotide sequences of SEQ ID NOs: 954 to 1174.

15. The animal model according to claim 14, wherein the nonhuman vertebrate is a mouse.

16. An animal model for bronchial asthma or chronic obstructive pulmonary disease, wherein the animal is a transgenic nonhuman vertebrate wherein the expression level of a marker gene, or a gene functionally equivalent to the marker gene, has been decreased in the respiratory tissue, wherein the marker gene is any one selected from the group according to (b) in claim 1 or the following (B):
(B) a group of genes whose expression levels decrease in the lung of an animal model for bronchial hypersensitivity induced by an exposure to the ovalbumin antigen, wherein the genes comprise any one of the nucleotide sequences of SEQ ID NOs: 1376 to 1515.

17. The animal model according to claim 16, wherein the nonhuman vertebrate is a mouse.

18. A method for producing an animal model for bronchial asthma or chronic obstructive pulmonary disease, which comprises the step of administering to a mouse any one of (i) or (ii):
(i) a polynucleotide comprising the nucleotide sequence constituting any one of the genes selected from the gene group according to (A) in claim 14; and
(ii) a protein encoded by a polynucleotide comprising the nucleotide sequence constituting any one of the genes selected from the gene group according to (A) in claim 14.

19. An inducer that induces bronchial asthma in a mouse, wherein said inducer comprises as an active ingredient (i) or (ii) in claim 18.

20. A method of screening for a therapeutic agent for bronchial asthma or chronic obstructive pulmonary disease comprising the steps of:
(1) administering a candidate compound to an animal subject,
(2) assaying the expression level of the marker gene in a biological sample obtained from the animal subject, and
(3) selecting a compound that decreases the expression level of a marker gene belonging to group (a) or a compound that increases the expression level of a marker gene belonging to group (b), as compared to that in a control with which the candidate compound has not been contacted,
wherein the marker gene is any one selected from the group consisting of (a) or (b) in claim 1, or a gene functionally equivalent to said marker gene.

21. A method of screening for a therapeutic agent for bronchial asthma or chronic obstructive pulmonary disease comprising the steps of:
(1) contacting a candidate compound with a cell into which a vector has been introduced, wherein the vector comprises a transcriptional regulatory region of a marker gene and a reporter gene that is expressed under the control of the transcriptional regulatory region,
(2) measuring the activity of the reporter gene, and
(3) selecting a compound that decreases the expression level of the reporter gene when the marker gene belongs to group (a), or a compound that increases the expression level of the reporter gene when the marker gene belongs to group (b), as compared to that in a control with which the candidate compound has not been contacted,
wherein the marker gene is any one selected from the group according to (a) or (b) in claim 1, or a gene functionally equivalent to the marker gene.

22. A method of screening for a therapeutic agent for bronchial asthma or chronic obstructive pulmonary disease comprising the steps of:
(1) contacting a candidate compound with a protein encoded by a marker gene,
(2) measuring the activity of the protein, and
(3) selecting a compound that decreases the activity when the marker gene belongs to group (a), or a compound that increases the activity when the marker gene belongs to the group (b), as compared to that in a control where the candidate compound has not been contacted,
wherein the marker gene is any one selected from the group according to (a) or (b) in claim 1, or a gene functionally equivalent to the marker gene.

23. A therapeutic agent for bronchial asthma or chronic obstructive pulmonary disease, which comprises as an active ingredient a compound being obtainable by the screening method according to claim 7.

24. A therapeutic agent for bronchial asthma or chronic obstructive pulmonary disease, which comprises as an active ingredient a marker gene or an antisense nucleic acid corresponding to a portion of the marker gene, a ribozyme, or a polynucleotide that suppresses the expression of the gene through an RNAi effect, wherein the marker gene is any one selected from the group according to (a) in claim 1.

25. A therapeutic agent for bronchial asthma or chronic obstructive pulmonary disease, which comprises as an active ingredient an antibody recognizing a protein encoded by a marker gene, wherein the marker gene is any one selected from the group according to (a) in claim 1.

26. A therapeutic agent for bronchial asthma or chronic obstructive pulmonary disease, which comprises as an active ingredient a marker gene, or a protein encoded by a marker gene, wherein the marker gene is any one selected from the group according to (b) in claim 1.

27. A DNA chip for testing for bronchial asthma or a chronic obstructive pulmonary disease, on which a probe has been immobilized to assay a marker gene, and wherein the marker gene comprises at least a single type of gene selected from group (a) and (b) in claim 1.

28. The kit according to claim 11, which further comprises a cell-supporting material to culture respiratory epithelial cells under conditions in which the culture medium is supplied from the basolateral side of the cells.

29. The kit according to claim 28, which further comprises respiratory epithelial cells.

30. A method for producing an animal model for bronchial asthma or chronic obstructive pulmonary disease, which comprises the step of administering to a mouse any one of (i) or (ii):
(i) an antisense nucleic acid of a polynucleotide comprising the nucleotide sequence constituting any one of the genes selected from the gene group according to (B) in claim 16, a ribozyme, or a polynucleotide that suppresses the expression of a gene through an RNAi (RNA interference) effect; and
(ii) an antibody that binds to a protein encoded by a polynucleotide comprising the nucleotide sequence constituting any one of the genes selected from the gene group according to (B) in claim 16, or a fragment comprising an antigen-binding region thereof.

31. An inducer that induces bronchial asthma in a mouse, wherein said inducer comprises as an active ingredient (i) or (ii) in claim 30.

32. A method of screening for a therapeutic agent for bronchial asthma or chronic obstructive pulmonary disease comprising the steps of:
(1) administering a candidate compound to an animal subject,
(2) assaying the expression level of the marker gene in a biological sample obtained from the animal subject, and
(3) selecting a compound that decreases the expression level of a marker gene belonging to group (a) or (A), or a compound that increases the expression level of a marker gene belonging to group (b) or (B), as compared to that in a control with which the candidate compound has not been contacted,
wherein the marker gene is any one selected from the group consisting of (A) in claim 14, or a gene functionally equivalent to said marker gene.

33. A method of screening for a therapeutic agent for bronchial asthma or chronic obstructive pulmonary disease comprising the steps of:
(1) administering a candidate compound to an animal subject,
(2) assaying the expression level of the marker gene in a biological sample obtained from the animal subject, and
(3) selecting a compound that decreases the expression level of a marker gene belonging to group (a) or (A), or a compound that increases the expression level of a marker gene belonging to group (b) or (B), as compared to that in a control with which the candidate compound has not been contacted,
wherein the marker gene is any one selected from the group consisting of (B) in claim 16, or a gene functionally equivalent to said marker gene.

34. A therapeutic agent for bronchial asthma or chronic obstructive pulmonary disease, which comprises as an active ingredient a compound being obtainable by the screening method according to claim 20.

35. A therapeutic agent for bronchial asthma or chronic obstructive pulmonary disease, which comprises as an active ingredient a compound being obtainable by the screening method according to claim 32.

36. A therapeutic agent for bronchial asthma or chronic obstructive pulmonary disease, which comprises as an active ingredient a compound being obtainable by the screening method according to claim 33.

37. A therapeutic agent for bronchial asthma or chronic obstructive pulmonary disease, which comprises as an active ingredient a compound being obtainable by the screening method according to claim 21.

38. A therapeutic agent for bronchial asthma or chronic obstructive pulmonary disease, which comprises as an active ingredient a compound being obtainable by the screening method according to claim 22.

The application's sequence listing, which the Patent Office published only in electronic form, follows.

SEQUENCE LISTING (2086 sequences)

SEQ ID NO: 1 - DNA, 63 bp, Artificial
  an artificially synthesized T7-(dT)24 primer sequence
ggccagtgaattgtaatacgactcactatagggaggcggtttttttttttttttttttttttt

SEQ ID NO: 2 - DNA, 4930 bp, Homo sapiens
ctcagccttcccggttcgggaaaggggaagaatgcaggaggggtaggatttctttcctgataggatcggttgggaaagaccgcagcctgtgtgtgtctttcccttcgaccaaggtgtctgttgctccgtaaataaaacgtcccactgccttctgagagcgctataaaggcagcggaagggtagtccgcggggcattccgggcggggcgcgagcagagacaggtcatggcagcgccaggcggcaggtcggagccgccgcagctccccgagtacagctgcagctacatggtgtcgcggccggtctacagcgagctcgctttccagcaacagcacgagcggcgcctgcaggagcgcaagacgctgcgggagagcctggccaagtgctgcagttgttcaagaaagagagcctttggtgtgctaaagactcttgtgcccatcttggagtggctccccaaataccgagtcaaggaatggctgcttagtgacgtcatttcgggagttagtactgggctagtggccacgctgcaagggatggcatatgccctactagctgcagttcctgtcggatatggtctctactctgcttttttccctatcctgacatactttatctttggaacatcaagacatatctcagttggaccttttccagtggtgagtttaatggtgggatctgttgttctgagcatggcccccgacgaacactttctcgtatccagcagcaatggaactgtattaaatactactatgatagacactgcagctagagatacagctagagtcctgattgccagtgccctgactctgctggttggaattatacagttgatatttggtggcttgcagattggattcatagtgaggtacttggcagatcctttggttggtggcttcacaacagctgctgccttccaagtgctggtctcacagctaaagattgtcctcaatgtttcaaccaaaaactacaatggagttctctctattatctatacgctggttgagatttttcaaaatattggtgataccaatcttgctgatttcactgctggattgctcaccattgtcgtctgtatggcagttaaggaattaaatgatcggtttagacacaaaatcccagtccctattcctatagaagtaattgtgacgataattgctactgccatttcatatggagccaacctggaaaaaaattacaatgctggcattgttaaatccatcccaagggggtttttgcctcctgaacttccacctgtgagcttgttctcggagatgctggctgcatcattttccatcgctgtggtggcttatgctattgcagtgtcagtaggaaaagtatatgccaccaagtatgattacaccatcgatgggaaccaggaattcattgcctttgggatcagcaacatcttctcaggattcttctcttgttttgtggccaccactgctctttcccgcacggccgtccaggagagcactggaggaaagacacaggttgctggcatcatctctgctgcgattgtgatgatcgccattcttgccctggggaagcttctggaacccttgcagaagtcggtcttggcagctgttgtaattgccaacctgaaagggatgtttatgcagctgtgtgacattcctcgtctgtggagacagaataagattgatgctgttatctgggtgtttacgtgtatagtgtccatcattctggggctggatctcggtttactagctggccttatatttggactgttgactgtggtcctgagagttcagtttccttcttggaatggccttggaagcatccctagcacagatatctacaaaagtaccaagaattacaaaaacattgaagaacctcaaggagtgaagattcttagattttccagtcctattttctatggcaatgtcgatggttttaaaaaatgtatcaagtccacagttggatttgatgccattagagtatataataagaggctgaaagcgctgaggaaaatacagaaactaataaaaagtggacaattaagagcaacaaagaatggcatcataagtgatgctgtttcaacaaataatgcttttgagcctgatgaggatattgaagatctggaggaacttgatatcccaaccaaggaaatagagattcaagtggattggaactctgagcttccagtcaaagtgaacgttcccaaagtgccaatccatagccttgtgcttgactgtggagctatatctttcctggacgttgttggagtgagatcactgcgggtgattgtcaaagaattccaaagaattgatgtgaatgtgtattttgcatcacttcaagattatgtgatagaaaagctggagcaatgcgggttctttgacgacaacattagaaaggacacattctttttgacggtccatgatgctatactctatctacagaaccaagtgaaatctcaagagggtcaaggttccattttagaaacgatcactctcattcaggattgtaaagatacccttgaattaatagaaacagagctgacggaagaagaacttgatgtccaggatgaggctatgcgtacacttgcatcctgaaagtgggttcgggaggtctctatgagcaaggaatacaagacaaaacttcctcaatgcattgactatttcttcagactcaaaacactcattcttttttctattaagccattgaaagagaagcactaagactgcttctaggctttatttataaaataaacaccttatccctaacatgggcaaaatggctagaattattcagacgatttggcagcgtccagggtaagctggtgttataatacgctgctgatctacatcacagatttgctaataatgttcacgtgggccctggcatatctctgttcagttagagtgagtgctgacccaacagcctctgtggtcaagcgagtcacgaatgattaatcataaagaaaaatcagtttttgactgacctggatatccatgagctgcactgatcaccatgtaaggtcacatttagtaaatgctgaaataaaatgattaatgcatttatcaataaaagcctttgaaaatactttggataataaattggagttttaaaaatgcaaatttgcttagtatctaataatgaagtgttattacatatagccggaattgaggatctctttgatcctggaaatggtttacctaaaagctacagaaccaggccaatatattttgaaatattgatgcagacaaatgaaataataaagagattttcatggtttataaaaatcttttttgatatgataataatcatgatcacaactgagatcaaaaaaatatatgacagattattttgtttaaaaatgcagttttaattatcttagtctatagaaatgatcattgcatggaggcatgtataggtatgatctgtgtaaaatctgacataaaaacagtgctattctgagtgaaaatttttttgatgtgcttacataaccatggtgattaaaatgagtttatattttttctcaaaaattttagcagtgtgtaaagtaagtaatctttaactgaactctgaccacttaaaaaaaaatctaaaaattgaactacctatagtagtctgtgtttaaagtgaatttttaaagacaaagcattctaaatgaactcaatataaaaacattcatttggaatgtacatactgaaaaatacaggtttttttgaccaaaagtttttatatcttttctttttatttatttttttcctaagtgccaacaattttctagatattatatacaacacaggctttgatcttggggacttttcccatatatttcacactggagtgaatgaagttgtacttcatttctagagaaaagttatacccaggtccccaattgagaatgtcttgcttgattgaaaacgacatcatcccttggtatactccagggattggtttcaggacccctgcatttaccaaaatttgtgcacactcaagtcctgcagtcacccctgcctaaagatagaatggcttctctgtttttcttctgaaatacaaccagaaacaatgtgtctatttctgaaagaataggattaatgatcatacaaatgggttaatcctgaattctggttgtaaatctggttacagcataactaggattataatgctgcctcattttcacagcactacttgcttatattgacaacaaatcatctcgctaaagagtgaatgtaggccaggcgcggtggctcatgcctgtaatcccagcactttgggaggccgaggcgggtggatcacgaggtcaggagatcgagaccatcctggctaacatggtaaaaccccgtctctactaaaaatagaaaaaaagaaattagcctagcgtggtggctggcgggcgcctgtagtcccagctatttgggaggctaaggcaggagaatggcgtgaacccgggaggcggagcttgcagtgagccgaggtcgtgccactgcactccagcctgggcgacagagcaagactccgtctcaaaaaaaaaaaaaaaaaaaaaaaaagagtgaatgtaatagtcttgcagaaaatgaatgaatacctttgttcaataaaggaaatatgcactgctcacttttttgaaggaaatgccaaagttacgttttacaacaaggctagagtttgtaaattctgggttcatttgtgatgacataagtcagcaaactgcgggaatactgtctcttctatgtattttgtgaatagtaagcataattttagttttgtattatcaatgaaaatttcacttgaaattaaagctgccttttgttatatttttaacctataggataagattccagtattgtatatgagttttaacaaattaaaaaatcaaatcatgtacatttgaaaatatttgcacacatttaaaaataaatgtaaagttgtcttttaaactactcggatgtgtcctttctgaacaaaa

SEQ ID NO: 3 - protein, 780 aa, Homo sapiens
MAAPGGRSEPPQLPEYSCSYMVSRPVYSELAFQQQHERRLQERKTLRESLAKCCSCSRKRAFGVLKTLVPILEWLPKYRVKEWLLSDVISGVSTGLVATLQGMAYALLAAVPVGYGLYSAFFPILTYFIFGTSRHISVGPFPVVSLMVGSVVLSMAPDEHFLVSSSNGTVLNTTMIDTAARDTARVLIASALTLLVGIIQLIFGGLQIGFIVRYLADPLVGGFTTAAAFQVLVSQLKIVLNVSTKNYNGVLSIIYTLVEIFQNIGDTNLADFTAGLLTIVVCMAVKELNDRFRHKIPVPIPIEVIVTIIATAISYGANLEKNYNAGIVKSIPRGFLPPELPPVSLFSEMLAASFSIAVVAYAIAVSVGKVYATKYDYTIDGNQEFIAFGISNIFSGFFSCFVATTALSRTAVQESTGGKTQVAGIISAAIVMIAILALGKLLEPLQKSVLAAVVIANLKGMFMQLCDIPRLWRQNKIDAVIWVFTCIVSIILGLDLGLLAGLIFGLLTVVLRVQFPSWNGLGSIPSTDIYKSTKNYKNIEEPQGVKILRFSSPIFYGNVDGFKKCIKSTVGFDAIRVYNKRLKALRKIQKLIKSGQLRATKNGIISDAVSTNNAFEPDEDIEDLEELDIPTKEIEIQVDWNSELPVKVNVPKVPIHSLVLDCGAISFLDVVGVRSLRVIVKEFQRIDVNVYFASLQDYVIEKLEQCGFFDDNIRKDTFFLTVHDAILYLQNQVKSQEGQGSILETITLIQDCKDTLELIETELTEEELDVQDEAMRTLAS

SEQ ID NO: 4 - DNA, 21 bp, Artificial
  an artificially synthesized primer sequence
tttgcctcctgaacttccacc

SEQ ID NO: 5 - DNA, 26 bp, Artificial
  an artificially synthesized primer sequence
cctactgacactgcaatagcataagc

SEQ ID NO: 6 - DNA, 26 bp, Artificial
  an artificially synthesized TaqMan probe sequence
  misc_binding (1)..(1): Label FAM(6-carboxy-fluorescein)
  misc_binding (26)..(26): Label TAMRA(6-carboxy-N,N,N',N'-tetramethylrhodamine)
cttgttctcggagatgctggctgcat

SEQ ID NO: 7 - DNA, 25 bp, Artificial
  an artificially synthesized primer sequence
tcacccacactgtgcccatctacga

SEQ ID NO: 8 - DNA, 25 bp, Artificial
  an artificially synthesized primer sequence
cagcggaaccgctcattgccaatgg

SEQ ID NO: 9 - DNA, 26 bp, Artificial
  an artificially synthesized TaqMan probe sequence
  misc_binding (1)..(1): Label FAM(6-carboxy-fluorescein)
  misc_binding (26)..(26): Label TAMRA(6-carboxy-N,N,N',N'-tetramethylrhodamine)
atgccctcccccatgccatcctgcgt

SEQ ID NO: 10 - DNA, 18 bp, Artificial
  an artificially synthesized primer sequence
gaaggtgaaggtcggagt

SEQ ID NO: 11 - DNA, 20 bp, Artificial
  an artificially synthesized primer sequence
gaagatggtgatgggatttc

SEQ ID NO: 12 - DNA, 20 bp, Artificial
  an artificially synthesized TaqMan probe sequence
  misc_binding (1)..(1): Label FAM(6-carboxy-fluorescein)
  misc_binding (20)..(20): Label TAMRA(6-carboxy-N,N,N',N'-tetramethylrhodamine)
caagcttcccgttctcagcc

SEQ ID NO: 13 - DNA, 3086 bp, Mus musculus
taactccggagcccaaacaggtggccggccgcagggacagtttgttgccagcgccgaggactgcgggacgcggaccggctttccgaagtcgctgccacaggtggcacccgaggctgctcccaggtgcccgccgcgggccgtttgctcgctccgcgtttccgaacgtcatccctcgtcgcatcccctccaggccggcggtcctcgggtacgcaggccatggcagcgcggggcggcaggtcggagccgccgcagctcgccgagtacagctgcagttacacggtgtcgcggccggtgtacagcgagctcgccttccagcagcagcgcgagcggcgcctgcctgagcgcaggacgctgcgggacagcctggcgcggagctgcagttgctcaagaaagagagcctttggtgtggtaaagactctcctgcccattctggactggctcccaaaataccgagtcaaggaatggctcctcagtgacatcatctccggagttagcactgggctggtgggtaccctgcaagggatggcttatgccctgctggcagcagtacctgttcagttcggtctctactctgcctttttccctatcctgacgtattttgtgttcggaacatcaagacacatctcagttggccctttccccgtggtcagtttaatggtgggatctgttgttctgagcatggctccagatgaccactttcttgtgcccagcggtaacggaagtgcattgaactcgaccacgttagacactggaaccagagatgcggcccgagtgttgcttgcaagcacactcactcttctagttggaatcatacagctggtgtttggaggtttgcagattggattcatagtgaggtacttggcagaccccttggttggcggattcacaaccgctgcagccttccaagtactggtctcacagctaaagatcgtgctcaatgtttcaaccaaaaactacaacggcatcctctccattatctacacactaattgagatttttcaaaatatcggtgacaccaatattgccgatttcatcgctgggctgctgaccatcatcgtctgtatggctgttaaggaactaaatgatcgatttaaacacagaatcccggtgcccattcctatagaagtgattgtgacaataattgctactgccatttcctatggggccaacttggaaaagaactacaatgctggcattgttaagtccatcccaagtgggttcttgcctcctgtcctgccatctgtgggcctgttttcggacatgttggctgcatccttttccattgctgtggtggcttacgctattgcagtgtctgtaggaaaagtctacgccaccaagcatgactatgtcatcgatgggaaccaggaattcattgcctttgggataagcaacgtcttctctggatttttctcctgttttgtggctaccactgctctgtctcgaacggctgtccaggagagcaccggggggaagacacaggtggctggcctcatctcagctgtgattgtgatggttgccatcgttgccttggggaggcttctggaacccttgcagaagtcagtcttggcggccgttgtcattgccaacctgaaagggatgtttatgcaggtgtgtgacgttcctcgtctgtggaagcagaataagactgatgctgttatctgggtgtttacatgcataatgtccatcattctggggctggacctcggcttgctagctggccttttatttgcactactgactgtggtcctgagagttcagttcccttcatggaatggccttggaagtgtccccagcacagacatctacaaaagcatcacacattataaaaaccttgaagagcctgaaggggtgaagatcctgagattttccagtcccattttttacggcaatgtcgatggttttaaaaaatgtatcaattcaacggttggatttgatgccattagagtatataataagaggctgaaagcactgagaagaatacagaaactcatcaaaaaaggacaactcagggcaaccaagaacgggatcataagtgatattggctcatcaaataatgccttcgagcctgatgaagatgtggaagagccagaggaacttaatatcccaaccaaagaaattgagattcaagtggactggaactccgaactcccggtgaaagtgaatgtcccaaaagtgccaatccacagcctggtgctggattgcggagctgtatccttcctggatgtggtaggagtgaggtcattgcgaatgattgtcaaagaatttcagagaattgatgtgaatgtgtactttgctctgcttcaagatgatgtgttagaaaagatggagcagtgtgggttctttgatgacaacattagaaaggacagattctttctgacggttcatgatgcaatcctccatctgcagaaccaggtcaaatccagagaaggccaggattccctgctagagacggtcgctcgcattcgggactgtaaagaccctcttgatctgatggaggcagagatgaatgcagaagagctcgatgttcaggatgaggccatgcgtagacttgcttcctgagagaggactgctagacagaacctggctgtcagcccagtctctgcaagtgttttctgcactgactgtttctttgcacttcagcagccatccgcttactgttacgttgaaatataatacagtctgaagcttcttaggcaccacacaagaaacacttgttgtttctgatgctttaatgcagaaacaagcagcttagctgcaaaatatccaaaaccaggagaattagccctgagaattagcaatgttcggatgtgctgcagtgactcactatgtgctgctgtgacacactgtgtgctggatgccaaagcaggtttgctgtctgagcccataagggttccatctgtctctgttaggctggcccaacagcttctatgggcaggtgagttaggaaggactaatcacagagattcctgactgactctgaaatccatgtgttgtgttgaccacagtgagaagaaggataaggtagaattactgtgtactcattaatgaactttaaagaaaataaaaccaatcttttaaaaatgaaa

SEQ ID NO: 14 - protein, 780 aa, Mus musculus
MAARGGRSEPPQLAEYSCSYTVSRPVYSELAFQQQRERRLPERRTLRDSLARSCSCSRKRAFGVVKTLLPILDWLPKYRVKEWLLSDIISGVSTGLVGTLQGMAYALLAAVPVQFGLYSAFFPILTYFVFGTSRHISVGPFPVVSLMVGSVVLSMAPDDHFLVPSGNGSALNSTTLDTGTRDAARVLLASTLTLLVGIIQLVFGGLQIGFIVRYLADPLVGGFTTAAAFQVLVSQLKIVLNVSTKNYNGILSIIYTLIEIFQNIGDTNIADFIAGLLTIIVCMAVKELNDRFKHRIPVPIPIEVIVTIIATAISYGANLEKNYNAGIVKSIPSGFLPPVLPSVGLFSDMLAASFSIAVVAYAIAVSVGKVYATKHDYVIDGNQEFIAFGISNVFSGFFSCFVATTALSRTAVQESTGGKTQVAGLISAVIVMVAIVALGRLLEPLQKSVLAAVVIANLKGMFMQVCDVPRLWKQNKTDAVIWVFTCIMSIILGLDLGLLAGLLFALLTVVLRVQFPSWNGLGSVPSTDIYKSITHYKNLEEPEGVKILRFSSPIFYGNVDGFKKCINSTVGFDAIRVYNKRLKALRRIQKLIKKGQLRATKNGIISDIGSSNNAFEPDEDVEEPEELNIPTKEIEIQVDWNSELPVKVNVPKVPIHSLVLDCGAVSFLDVVGVRSLRMIVKEFQRIDVNVYFALLQDDVLEKMEQCGFFDDNIRKDRFFLTVHDAILHLQNQVKSREGQDSLLETVARIRDCKDPLDLMEAEMNAEELDVQDEAMRRLAS

SEQ ID NO: 15 - DNA, 20 bp, Artificial
  an artificially synthesized primer sequence
ggttcttgcctcctgtcctg

SEQ ID NO: 16 - DNA, 20 bp, Artificial
  an artificially synthesized primer sequence
aatggaaaaggatgcagcca

SEQ ID NO: 17 - DNA, 26 bp, Artificial
  an artificially synthesized TaqMan probe sequence
  misc_binding (1)..(1): Label FAM(6-carboxy-fluorescein)
  misc_binding (26)..(26): Label TAMRA(6-carboxy-N,N,N',N'-tetramethylrhodamine)
catctgtgggcctgttttcggacatg

SEQ ID NO: 18 - DNA, 21 bp, Artificial
  an artificially synthesized primer sequence
actattggcaacgagcggttc

SEQ ID NO: 19 - DNA, 22 bp, Artificial
  an artificially synthesized primer sequence
ggatgccacaggattccatacc

SEQ ID NO: 20 - DNA, 28 bp, Artificial
  an artificially synthesized TaqMan probe sequence
  misc_binding (1)..(1): Label FAM(6-carboxy-fluorescein)
  misc_binding (28)..(28): Label TAMRA(6-carboxy-N,N,N',N'-tetramethylrhodamine)
cctgaggctcttttccagccttccttct

SEQ ID NO: 21 - DNA, 20 bp, Artificial
  an artificially synthesized primer sequence
gcaccaccaactgcttagcc

SEQ ID NO: 22 - DNA, 25 bp, Artificial
  an artificially synthesized primer sequence
ctttggcattgtggaagggctcatg

SEQ ID NO: 23 - DNA, 21 bp, Artificial
  an artificially synthesized TaqMan probe sequence
  misc_binding (1)..(1): Label FAM(6-carboxy-fluorescein)
  misc_binding (21)..(21): Label TAMRA(6-carboxy-N,N,N',N'-tetramethylrhodamine)
gatgcagggatgatgttctgg

SEQ ID NO: 24 - DNA, 421 bp, Mus musculus
gcaggtgtgtgacgttcctcgtctgtggaagcagaataagactgatgctgttatctgggtgtttacatgcataatgtccatcattctggggctggacctcggcttgctagctggccttttatttgcactactgactgtggtcctgagagttcagttcccttcatggaatggccttggaagtgtccccagcacagacatctacaaaagcatcacacattataaaaaccttgaagagcctgaaggggtgaagatcctgagattttccagtcccattttttacggcaatgtcgatggttttaaaaaatgtatcaattcaacggttggatttgatgccattagagtatataataagaggctgaaagcactgagaagaatacagaaactcatcaaaaaaggacaactcagggcaaccaagaacggg

SEQ ID NO: 25 - DNA, 5722 bp, Homo sapiens
ggacgcacaggcattccccgcgcccctccagccctcgccgccctcgccaccgctcccggccgccgcgctccggtacacacaggatccctgctgggcaccaacagctccaccatggggctggcctggggactaggcgtcctgttcctgatgcatgtgtgtggcaccaaccgcattccagagtctggcggagacaacagcgtgtttgacatctttgaactcaccggggccgcccgcaaggggtctgggcgccgactggtgaagggccccgacccttccagcccagctttccgcatcgaggatgccaacctgatcccccctgtgcctgatgacaagttccaagacctggtggatgctgtgcgggcagaaaagggtttcctccttctggcatccctgaggcagatgaagaagacccggggcacgctgctggccctggagcggaaagaccactctggccaggtcttcagcgtggtgtccaatggcaaggcgggcaccctggacctcagcctgaccgtccaaggaaagcagcacgtggtgtctgtggaagaagctctcctggcaaccggccagtggaagagcatcaccctgtttgtgcaggaagacagggcccagctgtacatcgactgtgaaaagatggagaatgctgagttggacgtccccatccaaagcgtcttcaccagagacctggccagcatcgccagactccgcatcgcaaaggggggcgtcaatgacaatttccagggggtgctgcagaatgtgaggtttgtctttggaaccacaccagaagacatcctcaggaacaaaggctgctccagctctaccagtgtcctcctcacccttgacaacaacgtggtgaatggttccagccctgccatccgcactaactacattggccacaagacaaaggacttgcaagccatctgcggcatctcctgtgatgagctgtccagcatggtcctggaactcaggggcctgcgcaccattgtgaccacgctgcaggacagcatccgcaaagtgactgaagagaacaaagagttggccaatgagctgaggcggcctcccctatgctatcacaacggagttcagtacagaaataacgaggaatggactgttgatagctgcactgagtgtcactgtcagaactcagttaccatctgcaaaaaggtgtcctgccccatcatgccctgctccaatgccacagttcctgatggagaatgctgtcctcgctgttggcccagcgactctgcggacgatggctggtctccatggtccgagtggacctcctgttctacgagctgtggcaatggaattcagcagcgcggccgctcctgcgatagcctcaacaaccgatgtgagggctcctcggtccagacacggacctgccacattcaggagtgtgacaaaagatttaaacaggatggtggctggagccactggtccccgtggtcatcttgttctgtgacatgtggtgatggtgtgatcacaaggatccggctctgcaactctcccagcccccagatgaatgggaaaccctgtgaaggcgaagcgcgggagaccaaagcctgcaagaaagacgcctgccccatcaatggaggctggggtccttggtcaccatgggacatctgttctgtcacctgtggaggaggggtacagaaacgtagtcgtctctgcaacaaccccgcaccccagtttggaggcaaggactgcgttggtgatgtaacagaaaaccagatctgcaacaagcaggactgtccaattgatggatgcctgtccaatccctgctttgccggcgtgaagtgtactagctaccctgatggcagctggaaatgtggtgcttgtccccctggttacagtggaaatggcatccagtgcacagatgttgatgagtgcaaagaagtgcctgatgcctgcttcaaccacaatggagagcaccggtgtgagaacacggaccccggctacaactgcctgccctgccccccacgcttcaccggctcacagcccttcggccagggtgtcgaacatgccacggccaacaaacaggtgtgcaagccccgtaacccctgcacggatgggacccacgactgcaacaagaacgccaagtgcaactacctgggccactatagcgaccccatgtaccgctgcgagtgcaagcctggctacgctggcaatggcatcatctgcggggaggacacagacctggatggctggcccaatgagaacctggtgtgcgtggccaatgcgacttaccactgcaaaaaggataattgccccaaccttcccaactcagggcaggaagactatgacaaggatggaattggtgatgcctgtgatgatgacgatgacaatgataaaattccagatgacagggacaactgtccattccattacaacccagctcagtatgactatgacagagatgatgtgggagaccgctgtgacaactgtccctacaaccacaacccagatcaggcagacacagacaacaatggggaaggagacgcctgtgctgcagacattgatggagacggtatcctcaatgaacgggacaactgccagtacgtctacaatgtggaccagagagacactgatatggatggggttggagatcagtgtgacaattgccccttggaacacaatccggatcagctggactctgactcagaccgcattggagatacctgtgacaacaatcaggatattgatgaagatggccaccagaacaatctggacaactgtccctatgtgcccaatgccaaccaggctgaccatgacaaagatggcaagggagatgcctgtgaccacgatgatgacaacgatggcattcctgatgacaaggacaactgcagactcgtgcccaatcccgaccagaaggactctgacggcgatggtcgaggtgatgcctgcaaagatgattttgaccatgacagtgtgccagacatcgatgacatctgtcctgagaatgttgacatcagtgagaccgatttccgccgattccagatgattcctctggaccccaaagggacatcccaaaatgaccctaactgggttgtacgccatcagggtaaagaactcgtccagactgtcaactgtgatcctggactcgctgtaggttatgatgagtttaatgctgtggacttcagtggcaccttcttcatcaacaccgaaagggacgatgactatgctggatttgtctttggctaccagtccagcagccgcttttatgttgtgatgtggaagcaagtcacccagtcctactgggacaccaaccccacgagggctcagggatactcgggcctttctgtgaaagttgtaaactccaccacagggcctggcgagcacctgcggaacgccctgtggcacacaggaaacacccctggccaggtgcgcaccctgtggcatgaccctcgtcacataggctggaaagatttcaccgcctacagatggcgtctcagccacaggccaaagacgggtttcattagagtggtgatgtatgaagggaagaaaatcatggctgactcaggacccatctatgataaaacctatgctggtggtagactagggttgtttgtcttctctcaagaaatggtgttcttctctgacctgaaatacgaatgtagagatccctaatcatcaaattgttgattgaaagactgatcataaaccaatgctggtattgcaccttctggaactatgggcttgagaaaacccccaggatcacttctccttggcttccttcttttctgtgcttgcatcagtgtggactcctagaacgtgcgacctgcctcaagaaaatgcagttttcaaaaacagactcatcagcattcagcctccaatgaataagacatcttccaagcatataaacaattgctttggtttccttttgaaaaagcatctacttgcttcagttgggaaggtgcccattccactctgcctttgtcacagagcagggtgctattgtgaggccatctctgagcagtggactcaaaagcattttcaggcatgtcagagaagggaggactcactagaattagcaaacaaaaccaccctgacatcctccttcaggaacacggggagcagaggccaaagcactaaggggagggcgcatacccgagacgattgtatgaagaaaatatggaggaactgttacatgttcggtactaagtcattttcaggggattgaaagactattgctggatttcatgatgctgactggcgttagctgattaacccatgtaaataggcacttaaatagaagcaggaaagggagacaaagactggcttctggacttcctccctgatccccacccttactcatcaccttgcagtggccagaattagggaatcagaatcaaaccagtgtaaggcagtgctggctgccattgcctggtcacattgaaattggtggcttcattctagatgtagcttgtgcagatgtagcaggaaaataggaaaacctaccatctcagtgagcaccagctgcctcccaaaggaggggcagccgtgcttatatttttatggttacaatggcacaaaattattatcaacctaactaaaacattccttttctcttttttccgtaattactaggtagttttctaattctctcttttggaagtatgatttttttaaagtctttacgatgtaaaatatttattttttacttattctggaagatctggctgaaggattattcatggaacaggaagaagcgtaaagactatccatgtcatctttgttgagagtcttcgtgactgtaagattgtaaatacagattatttattaactctgttctgcctggaaatttaggcttcatacggaaagtgtttgagagcaagtagttgacatttatcagcaaatctcttgcaagaacagcacaaggaaaatcagtctaataagctgctctgccccttgtgctcagagtggatgttatgggattccttttttctctgttttatcttttcaagtggaattagttggttatccatttgcaaatgttttaaattgcaaagaaagccatgaggtcttcaatactgttttaccccatcccttgtgcatatttccagggagaaggaaagcatatacacttttttctttcatttttccaaaagagaaaaaaatgacaaaaggtgaaacttacatacaaatattacctcatttgttgtgtgactgagtaaagaatttttggatcaagcggaaagagtttaagtgtctaacaaacttaaagctactgtagtacctaaaaagtcagtgttgtacatagcataaaaactctgcagagaagtattcccaataaggaaatagcattgaaatgttaaatacaatttctgaaagttatgttttttttctatcatctggtataccattgctttatttttataaattattttctcattgccattggaatagaatattcagattgtgtagatatgctatttaaataatttatcaggaaatactgcctgtagagttagtatttctatttttatataatgtttgcacactgaattgaagaattgttggttttttcttttttttgttttttttttttttttttttttttttgcttttgacctcccatttttactatttgccaatacctttttctaggaatgtgcttttttttgtacacatttttatccattttacattctaaagcagtgtaagttgtatattactgtttcttatgtacaaggaacaacaataaatcatatggaaatttatattt

SEQ ID NO: 26 - DNA, 3213 bp, Homo sapiens
agagactcaagatgattccctttttacccatgttttctctactattgctgcttattgttaaccctataaacgccaacaatcattatgacaagatcttggctcatagtcgtatcaggggtcgggaccaaggcccaaatgtctgtgcccttcaacagattttgggcaccaaaaagaaatacttcagcacttgtaagaactggtataaaaagtccatctgtggacagaaaacgactgttttatatgaatgttgccctggttatatgagaatggaaggaatgaaaggctgcccagcagttttgcccattgaccatgtttatggcactctgggcatcgtgggagccaccacaacgcagcgctattctgacgcctcaaaactgagggaggagatcgagggaaagggatccttcacttactttgcaccgagtaatgaggcttgggacaacttggattctgatatccgtagaggtttggagagcaacgtgaatgttgaattactgaatgctttacatagtcacatgattaataagagaatgttgaccaaggacttaaaaaatggcatgattattccttcaatgtataacaatttggggcttttcattaaccattatcctaatggggttgtcactgttaattgtgctcgaatcatccatgggaaccagattgcaacaaatggtgttgtccatgtcattgaccgtgtgcttacacaaattggtacctcaattcaagacttcattgaagcagaagatgacctttcatcttttagagcagctgccatcacatcggacatattggaggcccttggaagagacggtcacttcacactctttgctcccaccaatgaggcttttgagaaacttccacgaggtgtcctagaaaggttcatgggagacaaagtggcttccgaagctcttatgaagtaccacatcttaaatactctccagtgttctgagtctattatgggaggagcagtctttgagacgctggaaggaaatacaattgagataggatgtgacggtgacagtataacagtaaatggaatcaaaatggtgaacaaaaaggatattgtgacaaataatggtgtgatccatttgattgatcaggtcctaattcctgattctgccaaacaagttattgagctggctggaaaacagcaaaccaccttcacggatcttgtggcccaattaggcttggcatctgctctgaggccagatggagaatacactttgctggcacctgtgaataatgcattttctgatgatactctcagcatggttcagcgcctccttaaattaattctgcagaatcacatattgaaagtaaaagttggccttaatgagctttacaacgggcaaatactggaaaccatcggaggcaaacagctcagagtcttcgtatatcgtacagctgtctgcattgaaaattcatgcatggagaaagggagtaagcaagggagaaacggtgcgattcacatattccgcgagatcatcaagccagcagagaaatccctccatgaaaagttaaaacaagataagcgctttagcaccttcctcagcctacttgaagctgcagacttgaaagagctcctgacacaacctggagactggacattatttgtgccaaccaatgatgcttttaagggaatgactagtgaagaaaaagaaattctgatacgggacaaaaatgctcttcaaaacatcattctttatcacctgacaccaggagttttcattggaaaaggatttgaacctggtgttactaacattttaaagaccacacaaggaagcaaaatctttctgaaagaagtaaatgatacacttctggtgaatgaattgaaatcaaaagaatctgacatcatgacaacaaatggtgtaattcatgttgtagataaactcctctatccagcagacacacctgttggaaatgatcaactgctggaaatacttaataaattaatcaaatacatccaaattaagtttgttcgtggtagcaccttcaaagaaatccccgtgactgtctatacaactaaaattataaccaaagttgtggaaccaaaaattaaagtgattgaaggcagtcttcagcctattatcaaaactgaaggacccacactaacaaaagtcaaaattgaaggtgaacctgaattcagactgattaaagaaggtgaaacaataactgaagtgatccatggagagccaattattaaaaaatacaccaaaatcattgatggagtgcctgtggaaataactgaaaaagagacacgagaagaacgaatcattacaggtcctgaaataaaatacactaggatttctactggaggtggagaaacagaagaaactctgaagaaattgttacaagaagaggtcaccaaggtcaccaaattcattgaaggtggtgatggtcatttatttgaagatgaagaaattaaaagactgcttcagggagacacacccgtgaggaagttgcaagccaacaaaaaagttcaaggttctagaagacgattaagggaaggtcgttctcagtgaaaatccaaaaaccagaaaaaaatgtttatacaaccctaagtcaataacctgaccttagaaaattgtgagagccaagttgacttcaggaactgaaacatcagcacaaagaagcaatcatcaaataattctgaacacaaatttaatatttttttttctgaatgagaaacatgagggaaattgtggagttagcctcctgtggtaaaggaattgaagaaaatataacaccttacaccctttttcatcttgacattaaaagttctggctaactttggaatccattagagaaaaatccttgtcaccagattcattacaattcaaatcgaagagttgtgaactgttatcccattgaaaagaccgagccttgtatgtatgttatggatacataaaatgcacgcaagccattatctctccatgggaagctaagttataaaaataggtgcttggtgtacaaaactttttatatcaaaaggctttgcacatttctatatgagtgggtttactggtaaattatgttattttttacaactaattttgtactctcagaatgtttgtcatatgcttcttgcaatgcatattttttaatctcaaacgtttcaataaaaccatttttcagatataaagagaattacttcaaattgagtaattcagaaaaactcaagatttaagttaaaaagtggtttggacttgggaa

SEQ ID NO: 27 - DNA, 4521 bp, Homo sapiens
acttcattcacttgcaaatcagtgtgtgcccacaagagccagctctcccgagcccgtaaccttcgcatcccaagagctgcagtttcagccgcgacagcaagaacggcagagccggcgaccgcggcggcggcggcggcggaggcaggagcagcctgggcgggtcgcagggtctccgcgggcgcaggaaggcgagcagagatatcctctgagagccaagcaaagaacattaaggaaggaaggaggaatgaggctggatacggtgcagtgaaaaaggcacttccaagagtggggcactcactacgcacagactcgacggtgccatcagcatgagaacttaccgctacttcttgctgctcttttgggtgggccagccctacccaactctctcaactccactatcaaagaggactagtggtttcccagcaaagaaaagggccctggagctctctggaaacagcaaaaatgagctgaaccgttcaaaaaggagctggatgtggaatcagttctttctcctggaggaatacacaggatccgattatcagtatgtgggcaagttacattcagaccaggatagaggagatggatcacttaaatatatcctttcaggagatggagcaggagatctcttcattattaatgaaaacacaggcgacatacaggccaccaagaggctggacagggaagaaaaacccgtttacatccttcgagctcaagctataaacagaaggacagggagacccgtggagcccgagtctgaattcatcatcaagatccatgacatcaatgacaatgaaccaatattcaccaaggaggtttacacagccactgtccctgaaatgtctgatgtcggtacatttgttgtccaagtcactgcgacggatgcagatgatccaacatatgggaacagtgctaaagttgtctacagtattctacagggacagccctatttttcagttgaatcagaaacaggtattatcaagacagctttgctcaacatggatcgagaaaacagggagcagtaccaagtggtgattcaagccaaggatatgggcggccagatgggaggattatctgggaccaccaccgtgaacatcacactgactgatgtcaacgacaaccctccccgattcccccagagtacataccagtttaaaactcctgaatcttctccaccggggacaccaattggcagaatcaaagccagcgacgctgatgtgggagaaaatgctgaaattgagtacagcatcacagacggtgaggggctggatatgtttgatgtcatcaccgaccaggaaacccaggaagggattataactgtcaaaaagctcttggactttgaaaagaagaaagtgtatacccttaaagtggaagcctccaatccttatgttgagccacgatttctctacttggggcctttcaaagattcagccacggttagaattgtggtggaggatgtagatgagccacctgtcttcagcaaactggcctacatcttacaaataagagaagatgctcagataaacaccacaataggctccgtcacagcccaagatccagatgctgccaggaatcctgtcaagtactctgtagatcgacacacagatatggacagaatattcaacattgattctggaaatggttcgatttttacatcgaaacttcttgaccgagaaacactgctatggcacaacattacagtgatagcaacagagatcaataatccaaagcaaagtagtcgagtacctctatatattaaagttctagatgtcaatgacaacgccccagaatttgctgagttctatgaaacttttgtctgtgaaaaagcaaaggcagatcagttgattcagaccctgcatgctgttgacaaggatgacccttatagtggacaccaattttcgttttccttggcccctgaagcagccagtggctcaaactttaccattcaagacaacaaagacaacacggcgggaatcttaactcggaaaaatggctataatagacacgagatgagcacctatctcttgcctgtggtcatttcagacaacgactacccagttcaaagcagcactgggacagtgactgtccgggtctgtgcatgtgaccaccacgggaacatgcaatcctgccatgcggaggcgctcatccaccccacgggactgagcacgggggctctggttgccatccttctgtgcatcgtgatcctactagtgacagtggtgctgtttgcagctctgaggcggcagcgaaaaaaagagcctttgatcatttccaaagaggacatcagagataacattgtcagttacaacgacgaaggtggtggagaggaggacacccaggcttttgatatcggcaccctgaggaatcctgaagccatagaggacaacaaattacgaagggacattgtgcccgaagcccttttcctaccccgacggactccaacagctcgcgacaacaccgatgtcagagatttcattaaccaaaggttaaaggaaaatgacacggaccccactgccccgccatacgactccttggccacttacgcctatgaaggcactggctccgtggcggattccctgagctcgctggagtcagtgaccacggatgcagatcaagactatgattaccttagtgactggggacctcgattcaaaaagcttgcagatatgtatggaggagtggacagtgacaaagactcctaatctgttgcctttttcattttccaatacgacactgaaatatgtgaagtggctatttctttatatttatccactactccgtgaaggcttctctgttctacccgttccaaaagccaatggctgcagtccgtgtggatccaatgttagagacttttttctagtacacttttatgagcttccaaggggcaaatttttattttttagtgcatccagttaaccaagtcagcccaacaggcaggtgccggaggggaggacagggaacagtatttccacttgttctcagggcagcgtgcccgcttccgctgtcctggtgttttactacactccatgtcaggtcagccaactgccctaactgtacatttcacaggctaatgggataaaggactgtgctttaaagataaaaatatcatcatagtaaaagaaatgagggcatatcggctcacaaagagataaactacataggggtgtttatttgtgtcacaaagaatttaaaataacacttgcccatgctatttgttcttcaagaactttctctgccatcaactactattcaaaacctcaaatccacccatatgttaaaattctcattactcttaaggaatagaagcaaattaaacggtaacatccaaaagcaaccacaaacctagtacgacttcattccttccactaactcatagtttgttatatcctagactagacatgcgaaagtttgcctttgtaccatataaagggggagggaaatagctaataatgttaaccaaggaaatatattttaccatacatttaaagttttggccaccacatgtatcacgggtcacttgaaattctttcagctatcagtaggctaatgtcaaaattgtttaaaaattcttgaaagaattttcctgagacaaattttaacttcttgtctatagttgtcagtattattctactatactgtacatgaaagtagcagtgtgaagtacaataattcatattcttcatatccttcttacacgactaagttgaattagtaaagttagattaaataaaacttaaatctcactctaggagttcagtggagaggttagagccagccacacttgaacctaataccctgcccttgacatctggaaacctctacatatttatataacgtgatacatttggataaacaacattgagattatgatgaaaacctacatattccatgtttggaagacccttggaagaggaaaattggattcccttaaacaaaagtgtttaagattgtaattaaaatgatagttgattttcaaaagcattaattttttttcattgtttttaactttgctttcatgaccatcctgccatccttgactttgaactaatgataaagtaatgatctcaaactatgacagaaaagtaatgtaaaatccatccaatctattatttctctaattatgcaattagcctcatagttattatccagaggacccaactgaactgaactaatccttctggcagattcaaatcgtttatttcacacgctgttctaatggcacttatcattagaatcttaccttgtgcagtcatcagaaattccagcgtactataatgaaaacatccttgttttgaaaacctaaaagacaggctctgtatatatatatacttaagaatatgctgacttcacttattagtcttagggatttattttcaattaatattaattttctacaaataattttagtgtcatttccatttggggatattgtcatatcagcacatattttctgtttggaaacacactgttgtttagttaagttttaaataggtgtattacccaagaagtaaagatggaaacgtt

SEQ ID NO: 28 - DNA, 2986 bp, Homo sapiens
gcgccccagtcgacgctgagctcctctgctactcagagttgcaacctcagcctcgctatggctcccagcagcccccggcccgcgctgcccgcactcctggtcctgctcggggctctgttcccaggacctggcaatgcccagacatctgtgtccccctcaaaagtcatcctgccccggggaggctccgtgctggtgacatgcagcacctcctgtgaccagcccaagttgttgggcatagagaccccgttgcctaaaaaggagttgctcctgcctgggaacaaccggaaggtgtatgaactgagcaatgtgcaagaagatagccaaccaatgtgctattcaaactgccctgatgggcagtcaacagctaaaaccttcctcaccgtgtactggactccagaacgggtggaactggcacccctcccctcttggcagccagtgggcaagaaccttaccctacgctgccaggtggagggtggggcaccccgggccaacctcaccgtggtgctgctccgtggggagaaggagctgaaacgggagccagctgtgggggagcccgctgaggtcacgaccacggtgctggtgaggagagatcaccatggagccaatttctcgtgccgcactgaactggacctgcggccccaagggctggagctgtttgagaacacctcggccccctaccagctccagacctttgtcctgccagcgactcccccacaacttgtcagcccccgggtcctagaggtggacacgcaggggaccgtggtctgttccctggacgggctgttcccagtctcggaggcccaggtccacctggcactgggggaccagaggttgaaccccacagtcacctatggcaacgactccttctcggccaaggcctcagtcagtgtgaccgcagaggacgagggcacccagcggctgacgtgtgcagtaatactggggaaccagagccaggagacactgcagacagtgaccatctacagctttccggcgcccaacgtgattctgacgaagccagaggtctcagaagggaccgaggtgacagtgaagtgtgaggcccaccctagagccaaggtgacgctgaatggggttccagcccagccactgggcccgagggcccagctcctgctgaaggccaccccagaggacaacgggcgcagcttctcctgctctgcaaccctggaggtggccggccagcttatacacaagaaccagacccgggagcttcgtgtcctgtatggcccccgactggacgagagggattgtccgggaaactggacgtggccagaaaattcccagcagactccaatgtgccaggcttgggggaacccattgcccgagctcaagtgtctaaaggatggcactttcccactgcccatcggggaatcagtgactgtcactcgagatcttgagggcacctacctctgtcgggccaggagcactcaaggggaggtcacccgcgaggtgaccgtgaatgtgctctccccccggtatgagattgtcatcatcactgtggtagcagccgcagtcataatgggcactgcaggcctcagcacgtacctctataaccgccagcggaagatcaagaaatacagactacaacaggcccaaaaagggacccccatgaaaccgaacacacaagccacgcctccctgaacctatcccgggacagggcctcttcctcggccttcccatattggtggcagtggtgccacactgaacagagtggaagacatatgccatgcagctacacctaccggccctgggacgccggaggacagggcattgtcctcagtcagatacaacagcatttggggccatggtacctgcacacctaaaacactaggccacgcatctgatctgtagtcacatgactaagccaagaggaaggagcaagactcaagacatgattgatggatgttaaagtctagcctgatgagaggggaagtggtgggggagacatagccccaccatgaggacatacaactgggaaatactgaaacttgctgcctattgggtatgctgaggcccacagacttacagaagaagtggccctccatagacatgtgtagcatcaaaacacaaaggcccacacttcctgacggatgccagcttgggcactgctgtctactgaccccaacccttgatgatatgtatttattcatttgttattttaccagctatttattgagtgtcttttatgtaggctaaatgaacataggtctctggcctcacggagctcccagtccatgtcacattcaaggtcaccaggtacagttgtacaggttgtacactgcaggagagtgcctggcaaaaagatcaaatggggctgggacttctcattggccaacctgcctttccccagaaggagtgatttttctatcggcacaaaagcactatatggactggtaatggttcacaggttcagagattacccagtgaggccttattcctcccttccccccaaaactgacacctttgttagccacctccccacccacatacatttctgccagtgttcacaatgacactcagcggtcatgtctggacatgagtgcccagggaatatgcccaagctatgccttgtcctcttgtcctgtttgcatttcactgggagcttgcactattgcagctccagtttcctgcagtgatcagggtcctgcaagcagtggggaagggggccaaggtattggaggactccctcccagctttggaagggtcatccgcgtgtgtgtgtgtgtgtatgtgtagacaagctctcgctctgtcacccaggctggagtgcagtggtgcaatcatggttcactgcagtcttgaccttttgggctcaagtgatcctcccacctcagcctcctgagtagctgggaccataggctcacaacaccacacctggcaaatttgattttttttttttttttcagagacggggtctcgcaacattgcccagacttcctttgtgttagttaataaagctttctcaactgcc

SEQ ID NO: 29 - DNA, 2685 bp, Homo sapiens
ggacttgggaggcgcggtgaggagtcaggcttaaaacttgttggaggggagtaaccagcctgctcctctcgctctcctcctcgtctgcgccgcgtttcagagagaaaattcctgttccaagagaaaataaggcaacatcaatgaaggagagaagagccagccagaaattatccagcaaatctatcatggatcctaatcagaacgtgaaatgcaagatagttgtggtgggagacagtcagtgtggaaaaactgcgctgctccatgtcttcgccaaggactgcttccccgagaattacgttcctacagtgtttgagaattacacggccagttttgaaatcgacacacaaagaatagagttgagcctgtgggacacttcgggttctccttactatgacaatgtccgccccctctcttaccctgattcggatgctgtgctgatttgctttgacatcagtagaccagagaccctggacagtgtcctcaaaaagtggaaaggtgaaatccaggaattttgtccaaataccaaaatgctcttggtcggctgcaagtctgatctgcggacagatgttagtacattagtagagctctccaatcacaggcagacgccagtgtcctatgaccagggggcaaatatggccaaacagattggagcagctacttatatcgaatgctcagctttacagtcggaaaatagcgtcagagacatttttcacgttgccaccttggcatgtgtaaataagacaaataaaaacgttaagcggaacaaatcacagagagccacaaagcggatttcacacatgcctagcagaccagaactctcggcagttgctacggacttacgaaaggacaaagcgaagagctgcactgtgatgtgaatctttcattatctttaatgaagacaaaggaatctagtgtaaaaaacaacagcaaacaaaaaggtgaagtctaaatgaagtgcacagccaaagtcatgtataccagaggcttaggaggcgtttgagaggatactcatctttttggaatcctgaccttaggttcggcatgtagaccaagtgatgagaagtgaatacatggaagagtttttaagtgtgacttgaaaaatatgccaaaaaatgagagatacaaatgagctagaggaagatgaggggggatgcgagtacctccaagaagaaaaatcacactctgaatggtgcttgcatttttgggttttttttttttttgttataatctattcatggatctccactttgatttaatttttaaatgttttaatctcctttacaaaaagtatacgttaatataccgtcctcaagggggaactggcactgtgaccttagcatttagttttctagaggatgtgatctaatttctttctagctcatcattaaaaaggaaattgtatcaggacccatgggatatatccagaggcaaactttatgaggctttgaaatcttgccttcctgaagatagctgagtaggatggttctaaggaaagcctttgcaatcttgcaagatttgtagaccagcactacaaagatcgcatagatcaaataggaaaaaaaatgtcgatttttattcagtctgatggttctgttcttcattgtgattgtcattaaaaagtggtaaattgctcaatgtaatatttttgtgcgctgtttagaagttgtgtgattttttgccatcgttgataaaaatgcaaagtcaaataaaaggtgtcttggtttgatgtcatagaatgatccaaggagagaaaaaaggtagttactgttttcaccagaaaaggtaatgagtgaaggaaagaatagtagcagaaagcacagtttgtgagtaaagctgtctggaattaagttaccaaaaatacaaagcaaaaggactattattttgggttgaagctccaaaactgacagcatctgataatctgttggtttatttcacttttcattaaatgaacattgatgagagaagatgccacttacccaagctttagagaatccctagtggaagattatatgataaactttcagtcctgacataacactagggcatttctagagtgtcattgctaaaacctcactgaacagacgcagccaaggtctgtgttcagcacttggtctctgttgttacgtaaaataataagcatttaaaatagtttacagatatttttgaccagttccttttagagattctttcagagaagaaaccagatctgacctgtttattgttggcgcttgttgaaaacgagctttctttcccatgatagtgcttcgtttttgaagtgttgaagctgtgctccccttaaatcgtggcaggagagattaaggtaattacaacactcagttctatgtcttacaagcactttgtcttgtctctgcaagaaaattcgattccagtcatttcccataaaatacagacattttaccaacataatatgctttgattgatgcagcattatgctttgggcagtattacaaaatagctggcgagtgctttctgtatttaaatattgtaaaaagaaaataagttataactgttataaagcagaacttttgttgcattttttaaactgttgaagtcactgtgtatgtttgtttggtcaatgtttccgcagtatttattaaaacatacttttttttttcttcaaataaaaaagtaaccatgtctttgtctaaaaaaaaaaaaaaaaaa

SEQ ID NO: 30 - DNA, 1168 bp, Homo sapiens
ggcacgaggccccagccagctgtcccgagtctggactttccctctgcccctccccactctcaggctggtggggtggggaaagcagcccattcctgggctcagagactcccaccccagctcagagggagcaggggcccagccagggacggaccctcattcctcccagggaccccagacctctgtctctctcgggccttggctccttgaacttttggccgccatgtgcttcccgaaggtcctctctgatgacatgaagaagctgaaggcccgaatggtaatgctcctccctacttctgctcaggggttgggggcctgggtctcagcgtgtgacactgaggacactgtgggacacctgggaccctggagggacaaggatccggccctttggtgccaactctgcctctcttcacagcaccaggccatagaaagattttatgataaaatgcaaaatgcagaatcaggacgtggacaggtgatgtcgagcctggcagagctggaggacgacttcaaagagggctacctggagacagtggcggcttattatgaggagcagcacccagagctcactcctctacttgaaaaagaaagagatggattacggtgccgaggcaacagatcccctgtcccggatgttgaggatcccgcaaccgaggagcctggggagagcttttgtgacaaggtcatgagatggttccaggccatgctgcagcggctgcagacctggtggcacggggttctggcctgggtgaaggagaaggtggtggccctggtccatgcagtgcaggccctctggaaacagttccagagtttctgctgctctctgtcagagctcttcatgtcctctttccagtcctacggagccccacggggggacaaggaggagctgacaccccagaagtgctctgaaccccaatcctcaaaatgaagatactgacaccacctttgccctccccgtcaccgcgcacccaccctgacccctccctcagctgtcctgtgccccgccctctcccgcacactcagtccccctgcctggcgttcctgccgcagctctgacctggtgctgtcgccctggcatcttaataaaacctgcttatacttccctggcaggggagataccctgaaaaaaaaaaaaaaaaaaaaaaaaaaaaaaaaaaaaaaaaaaaaaaaa

SEQ ID NO: 31 - DNA, 2095 bp, Homo sapiens
gcgcctgtcagggaagcggcgcgcgcgcgcgggcggcgggcgggctggggatccgccgcgcagtgccagcgccagcgccagacccgcgccccgcgctctccggcccgtcgcctgccttgggactcgcgagcccgcactcccgccctgcctgttcgctgcccgagtatggagctgctgtgttgcgaaggcacccggcacgcgccccgggccgggccggacccgcggctgctgggggaccagcgtgtcctgcagagcctgctccgcctggaggagcgctacgtaccccgcgcctcctacttccagtgcgtgcagcgggagatcaagccgcacatgcggaagatgctggcttactggatgctggaggtatgtgaggagcagcgctgtgaggaggaagtcttccccctggccatgaactacctggatcgctacctgtcttgcgtccccacccgaaaggcgcagttgcagctcctgggtgcggtctgcatgctgctggcctccaagctgcgcgagaccacgcccctgaccatcgaaaaactgtgcatctacaccgaccacgctgtctctccccgccagttgcgggactgggaggtgctggtcctagggaagctcaagtgggacctggctgctgtgattgcacatgatttcctggccttcattctgcaccggctctctctgccccgtgaccgacaggccttggtcaaaaagcatgcccagacctttttggccctctgtgctacagattatacctttgccatgtacccgccatccatgatcgccacgggcagcattggggctgcagtgcaaggcctgggtgcctgctccatgtccggggatgagctcacagagctgctggcagggatcactggcactgaagtggactgcctgcgggcctgtcaggagcagatcgaagctgcactcagggagagcctcagggaagcctctcagaccagctccagcccagcgcccaaagccccccggggctccagcagccaagggcccagccagaccagcactcctacagatgtcacagccatacacctgtagccctggagaggccctctggagtggccactaagcagaggaggggccgctgccacccacctccctgcctccaggaaccacaccacatctaagcctgaaggggcgtctgttcccccttcacaaagcccaagggatctggtcctacccatccccgcagtgtgcactaaggggcccggccagccatgtctgcatttcggtggctagtcaagctcctcctccctgcatctgaccagcagcgcctttcccaactctagctgggggtgggccaggctgatgggacagaattggatacatacaccagcattccttttgaacgcccccccccacccctgggggctctcatgttttcaactgccaaaatgctctagtgccttctaaaggtgttgtcccttctagggttattgcatttggattggggtccctctaaaatttaatgcatgatagacacatatgagggggaatagtctagatggctcctctcagtactttggaggcccctatgtagtccgtgctgacagctgctcctagagggaggggcctaggcctcagccagagaagctataaattcctctttgctttgctttctgctcagcttctcctgtgtgattgacagctttgctgctgaaggctcattttaatttattaattgctttgagcacaactttaagaggacataatgggggcctggccatcccacaagtggtggtaaccctggtggttgctgttttcctcccttctgctactggcaaaaggatctttgtggccaaggagctgctatagcctggggtggggtcatgccctcctctcccattgtccctctgccccatcctccagcagggaaaatgcagcagggatgccctggaggtggctgagcccctgtctagagagggaggcaagccctgttgacacaggtctttcctaaggctgcaaggtttaggctggtggcccaggaccatcatcctactgtaataaagatgattgtgaaataaaactggctttggcttcttggaaaaaaaaaaaaaaaaaaaaaaaaaaaaaaaaaaaaaaaaaaaaa

SEQ ID NO: 32 - DNA, 1493 bp, Homo sapiens
ttcctttcatgttcagcatttctactccttccaagaagagcagcaaagctgaagtagcagcaacagcaccagcagcaacagcaaaaaacaaacatgagtgtgaagggcatggctatagccttggctgtgatattgtgtgctacagttgttcaaggcttccccatgttcaaaagaggacgctgtctttgcataggccctggggtaaaagcagtgaaagtggcagatattgagaaagcctccataatgtacccaagtaacaactgtgacaaaatagaagtgattattaccctgaaagaaaataaaggacaacgatgcctaaatcccaaatcgaagcaagcaaggcttataatcaaaaaagttgaaagaaagaatttttaaaaatatcaaaacatatgaagtcctggaaaagggcatctgaaaaacctagaacaagtttaactgtgactactgaaatgacaagaattctacagtaggaaactgagacttttctatggttttgtgactttcaacttttgtacagttatgtgaaggatgaaaggtgggtgaaaggaccaaaaacagaaatacagtcttcctgaatgaatgacaatcagaattccactgcccaaaggagtccagcaattaaatggatttctaggaaaagctaccttaagaaaggctggttaccatcggagtttacaaagtgctttcacgttcttacttgttgtattatacattcatgcatttctaggctagagaaccttctagatttgatgcttacaactattctgttgtgactatgagaacatttctgtctctagaagttatctgtctgtattgatctttatgctatattactatctgtggttacagtggagacattgacattattactggagtcaagcccttataagtcaaaagcatctatgtgtcgtaaagcattcctcaaacattttttcatgcaaatacacacttctttccccaaatatcatgtagcacatcaatatgtagggaaacattcttatgcatcatttggtttgttttataaccaattcattaaatgtaattcataaaatgtactatgaaaaaaattatacgctatgggatactggcaacagtgcacatatttcataaccaaattagcagcaccggtcttaatttgatgtttttcaacttttattcattgagatgttttgaagcaattaggatatgtgtgtttactgtactttttgttttgatccgtttgtataaatgatagcaatatcttggacacatttgaaatacaaaatgtttttgtctaccaaagaaaaatgttgaaaaataagcaaatgtatacctagcaatcacttttactttttgtaattctgtctcttagaaaaatacataatctaatcaatttctttgttcatgcctatatactgtaaaatttaggtatactcaagactagtttaaagaatcaaagtcatttttttctctaataaactaccacaacctttcttttttaaaaaaaaaaa

SEQ ID NO: 33 - DNA, 1172 bp, Homo sapiens
gagacattcctcaattgcttagacatattctgagcctacagcagaggaacctccagtctcagcaccatgaatcaaactgcgattctgatttgctgccttatctttctgactctaagtggcattcaaggagtacctctctctagaaccgtacgctgtacctgcatcagcattagtaatcaacctgttaatccaaggtctttagaaaaacttgaaattattcctgcaagccaattttgtccacgtgttgagatcattgctacaatgaaaaagaagggtgagaagagatgtctgaatccagaatcgaaggccatcaagaatttactgaaagcagttagcaaggaaatgtctaaaagatctccttaaaaccagaggggagcaaaatcgatgcagtgcttccaaggatggaccacacagaggctgcctctcccatcacttccctacatggagtatatgtcaagccataattgttcttagtttgcagttacactaaaaggtgaccaatgatggtcaccaaatcagctgctactactcctgtaggaaggttaatgttcatcatcctaagctattcagtaataactctaccctggcactataatgtaagctctactgaggtgctatgttcttagtggatgttctgaccctgcttcaaatatttccctcacctttcccatcttccaagggtactaaggaatctttctgctttggggtttatcagaattctcagaatctcaaataactaaaaggtatgcaatcaaatctgctttttaaagaatgctctttacttcatggacttccactgccatcctcccaaggggcccaaattctttcagtggctacctacatacaattccaaacacatacaggaaggtagaaatatctgaaaatgtatgtgtaagtattcttatttaatgaaagactgtacaaagtataagtcttagatgtatatatttcctatattgttttcagtgtacatggaataacatgtaattaagtactatgtatcaatgagtaacaggaaaattttaaaaatacagatagatatatgctctgcatgttacataagataaatgtgctgaatggttttcaaataaaaatgaggtactctcctggaaatattaagaaagactatctaaatgttgaaagatcaaaaggttaataaagtaattataact

SEQ ID NO: 34 - DNA, 1382 bp, Homo sapiens
cggatgaaggctatttgaagtcgccataacctggtcagaagtgtgcctgtcggcggggagagaggcaatatcaaggttttaaatctcggagaaatggctttcgtttgcttggctatcggatgcttatatacctttctgataagcacaacatttggctgtacttcatcttcagacaccgagataaaagttaaccctcctcaggattttgagatagtggatcccggatacttaggttatctctatttgcaatggcaacccccactgtctctggatcattttaaggaatgcacagtggaatatgaactaaaataccgaaacattggtagtgaaacatggaagaccatcattactaagaatctacattacaaagatgggtttgatcttaacaagggcattgaagcgaagatacacacgcttttaccatggcaatgcacaaatggatcagaagttcaaagttcctgggcagaaactacttattggatatcaccacaaggaattccagaaactaaagttcaggatatggattgcgtatattacaattggcaatatttactctgttcttggaaacctggcataggtgtacttcttgataccaattacaacttgttttactggtatgagggcttggatcatgcattacagtgtgttgattacatcaaggctgatggacaaaatataggatgcagatttccctatttggaggcatcagactataaagatttctatatttgtgttaatggatcatcagagaacaagcctatcagatccagttatttcacttttcagcttcaaaatatagttaaacctttgccgccagtctatcttacttttactcgggagagttcatgtgaaattaagctgaaatggagcatacctttgggacctattccagcaaggtgttttgattatgaaattgagatcagagaagatgatactaccttggtgactgctacagttgaaaatgaaacatacaccttgaaaacaacaaatgaaacccgacaattatgctttgtagtaagaagcaaagtgaatatttattgctcagatgacggaatttggagtgagtggagtgataaacaatgctgggaaggtgaagacctatcgaagaaaactttgctacgtttctggctaccatttggtttcatcttaatattagttatatttgtaaccggtctgcttttgcgtaagccaaacacctacccaaaaatgattccagaatttttctgtgatacatgaagactttccatatcaagagacatggtattgactcaacagtttccagtcatggccaaatgttcaatatgagtctcaataaactgaatttttcttgcgaaaaaaaaaaaaaaaaaaaaaaaaaaaaaaaaaaaaaaaaaaaaaaaaaa

SEQ ID NO: 35 - DNA, 1695 bp, Homo sapiens
caagcaggatacgtttttctgttgggcattgactagattgtttgcaaaagtttcgcatcaaaaacaaacaacaacaacaaaaaaccaaacaactctccttgatctatactttgagaattgttgatttctttttttttattctgacttttaaaaacaacttttttttccacttttttaaaaaatgcactactgtgtgctgagcgcttttctgatcctgcatctggtcacggtcgcgctcagcctgtctacctgcagcacactcgatatggaccagttcatgcgcaagaggatcgaggcgatccgcgggcagatcctgagcaagctgaagctcaccagtcccccagaagactatcctgagcccgaggaagtccccccggaggtgatttccatctacaacagcaccagggacttgctccaggagaaggcgagccggagggcggccgcctgcgagcgcgagaggagcgacgaagagtactacgccaaggaggtttacaaaatagacatgccgcccttcttcccctccgaaaatgccatcccgcccactttctacagaccctacttcagaattgttcgatttgacgtctcagcaatggagaagaatgcttccaatttggtgaaagcagagttcagagtctttcgtttgcagaacccaaaagccagagtgcctgaacaacggattgagctatatcagattctcaagtccaaagatttaacatctccaacccagcgctacatcgacagcaaagttgtgaaaacaagagcagaaggcgaatggctctccttcgatgtaactgatgctgttcatgaatggcttcaccataaagacaggaacctgggatttaaaataagcttacactgtccctgctgcacttttgtaccatctaataattacatcatcccaaataaaagtgaagaactagaagcaagatttgcaggtattgatggcacctccacatataccagtggtgatcagaaaactataaagtccactaggaaaaaaaacagtgggaagaccccacatctcctgctaatgttattgccctcctacagacttgagtcacaacagaccaaccggcggaagaagcgtgctttggatgcggcctattgctttagaaatgtgcaggataattgctgcctacgtccactttacattgatttcaagagggatctagggtggaaatggatacacgaacccaaagggtacaatgccaacttctgtgctggagcatgcccgtatttatggagttcagacactcagcacagcagggtcctgagcttatataataccataaatccagaagcatctgcttctccttgctgcgtgtcccaagatttagaacctctaaccattctctactacattggcaaaacacccaagattgaacagctttctaatatgattgtaaagtcttgcaaatgcagctaaaattcttggaaaagtggcaagaccaaaatgacaatgatgatgataatgatgatgacgacgacaacgatgatgcttgtaacaagaaaacataagagagccttggttcatcagtgttaaaaaatttttgaaaaggcggtactagttcagacactttggaagtttgtgttctgtttgttaaaactggcatctgacacaaaaaaagttgaaggccttattctacatttcacctactttgtaagtgagagagacaagaagcaaatttttttaaa

SEQ ID NO: 36 - DNA, 1438 bp, Homo sapiens
cggtaactaccccggctgcgcacagctcggcgctccttcccgctccctcacacaccgcctcagcccgcaccggcagtagaagatggtgaaagaaacaacttactacgatgttttgggggtcaaacccaatgctactcaggaagaattgaaaaaggcttataggaaactggccttgaagtaccatcctgataagaacccaaatgaaggagagaagtttaaacagatttctcaagcttacgaagttctctctgatgcaaagaaaagggaattatatgacaaaggaggagaacaggcaattaaagagggtggagcaggtggcggttttggctcccccatggacatctttgatatgttttttggaggaggaggaaggatgcagagagaaaggagaggtaaaaatgttgtacatcagctctcagtaaccctagaagacttatataatggtgcaacaagaaaactggctctgcaaaagaatgtgatttgtgacaaatgtgaaggtagaggaggtaagaaaggagcagtagagtgctgtcccaattgccgaggtactggaatgcaaataagaattcatcagataggacctggaatggttcagcaaattcagtctgtgtgcatggagtgccagggccatggggagcggatcagtcctaaagatagatgtaaaagctgcaacggaaggaagatagttcgagagaagaaaattttagaagttcatattgacaaaggcatgaaagatggccagaagataacattccatggtgaaggagaccaagaaccaggactggagccaggcgatattatcattgtgttagatcagaaggaccatgctgtttttactcgacgaggagaagaccttttcatgtgtatggacatacagctcgttgaagcactgtgtggcttccagaagccaatatctactcttgacaaccgaaccatcgtcatcacctctcatccaggtcagattgtcaagcatggagatatcaagtgtgtactaaatgaaggcatgccaatttatcgtagaccatatgaaaagggtcgcctaatcatcgaatttaaggtaaactttcctgagaatggctttctctctcctgataaactgtctttgctggaaaaactcctacccgagaggaaggaagtggaagagactgatgagatggaccaagtagaactggtggactttgatccaaatcaggaaagacggcgccactacaatggagaagcatatgaggatgatgaacatcatcccagaggtggtgttcagtgtcagacctcttaatggccagtgaataacactcactgctggcatttaatgtgcagtagtgaatgagtgaaggactgtaatcataatatgctcactacttgctcttgtttttgttttaataaactatagtagtgttataaaaagttaaatgaagaataaacgcaaatataaaagctc

SEQ ID NO: 37 - DNA, 1078 bp, Homo sapiens
cactcgctggtggtgggtgcgccgtgctgagctctggctgtcagtgtgttcgcccgcgtcccctccgcgctctccgcttgtggataactagctgctggttgatcgcactatgactctggaagaagtccgcggccaggacacagttccggaaagcacagccaggatgcagggtgccgggaaagcgctgcatgagttgctgctgtcggcgcagcgtcagggctgcctcactgccggcgtctacgagtcagccaaagtcttgaacgtggaccccgacaatgtgaccttctgtgtgctggctgcgggtgaggaggacgagggcgacatcgcgctgcagatccattttacgctgatccaggctttctgctgcgagaacgacatcgacatagtgcgcgtgggcgatgtgcagcggctggcggctatcgtgggcgccggcgaggaggcgggtgcgccgggcgacctgcactgcatcctcatttcgaaccccaacgaggacgcctggaaggatcccgccttggagaagctcagcctgttttgcgaggagagccgcagcgttaacgactgggtgcccagcatcaccctccccgagtgacagcccggcggggaccttggtctgatcgacgtggtgacgccccggggcgcctagagcgcggctggctctgtggaggggccctccgagggtgcccgagtgcggcgtggagactggcaggcggggggggcgcctggagagcgaggaggcgcggcctcccgaggaggggcccggtggcggcagggccaggctggtccgagctgaggactctgcaagtgtctggagcggctgctcgcccaggaaggcctaggctaggacgttggcctcagggccaggaaggacagactggccgggcaggcgtgactcagcagcctgcgctcggcaggaaggagcggcgccctggacttggtacagtttcaggagcgtgaaggacttaaccgactgccgctgctttttcaaaacggatccgggcaatgcttcgttttctaaaggatgctgctgttgaagctttgaattttacaataaactttttgaaacaaaaaaaaaaaaaaa

SEQ ID NO: 38 - DNA, 4062 bp, Homo sapiens
taccccggggaggcagtgcagccagctgcaagccccacagtgaagaacatctgagctcaaatccagataagtgacataagtgacctgctttgtaaagccatagagatggcctgtccttggaaatttctgttcaagaccaaattccaccagtatgcaatgaatggggaaaaagacatcaacaacaatgtggagaaagccccctgtgccacctccagtccagtgacacaggatgaccttcagtatcacaacctcagcaagcagcagaatgagtccccgcagcccctcgtggagacgggaaagaagtctccagaatctctggtcaagctggatgcaaccccattgtcctccccacggcatgtgaggatcaaaaactggggcagcgggatgactttccaagacacacttcaccataaggccaaagggattttaacttgcaggtccaaatcttgcctggggtccattatgactcccaaaagtttgaccagaggacccagggacaagcctacccctccagatgagcttctacctcaagctatcgaatttgtcaaccaatattacggctccttcaaagaggcaaaaatagaggaacatctggccagggtggaagcggtaacaaaggagatagaaacaacaggaacctaccaactgacgggagatgagctcatcttcgccaccaagcaggcctggcgcaatgccccacgctgcattgggaggatccagtggtccaacctgcaggtcttcgatgcccgcagctgttccactgcccgggaaatgtttgaacacatctgcagacacgtgcgttactccaccaacaatggcaacatcaggtcggccatcaccgtgttcccccagcggagtgatggcaagcacgacttccgggtgtggaatgctcagctcatccgctatgctggctaccagatgccagatggcagcatcagaggggaccctgccaacgtggaattcactcagctgtgcatcgacctgggctggaagcccaagtacggccgcttcgatgtggtccccctggtcctgcaggccaatggccgtgaccctgagctcttcgaaatcccacctgaccttgtgcttgaggtggccatggaacatcccaaatacgagtggtttcgggaactggagctaaagtggtacgccctgcctgcagtggccaacatgctgcttgaggtgggcggcctggagttcccagggtgccccttcaatggctggtacatgggcacagagatcggagtccgggacttctgtgacgtccagcgctacaacatcctggaggaagtgggcaggagaatgggcctggaaacgcacaagctggcctcgctctggaaagaccaggctgtcgttgagatcaacattgctgtgctccatagtttccagaagcagaatgtgaccatcatggaccaccactcggctgcagaatccttcatgaagtacatgcagaatgaataccggtcccgtgggggctgcccggcagactggatttggctggtccctcccatgtctgggagcatcacccccgtgtttcaccaggagatgctgaactacgtcctgtcccctttctactactatcaggtagaggcctggaaaacccatgtctggcaggacgagaagcggagacccaagagaagagagattccattgaaagtcttggtcaaagctgtgctctttgcctgtatgctgatgcgcaagacaatggcgtcccgagtcagagtcaccatcctctttgcgacagagacaggaaaatcagaggcgctggcctgggacctgggggccttattcagctgtgccttcaaccccaaggttgtctgcatggataagtacaggctgagctgcctggaggaggaacggctgctgttggtggtgaccagtacgtttggcaatggagactgccctggcaatggagagaaactgaagaaattgctcttcatgctgaaagagctcaacaacaaattcaggtacgctgtgtttggcctcggctccagcatgtaccctcggttctgcgcctttgctcatgacattgatcagaagctgtcccacctgggggcctctcagctcaccccgatgggagaaggggatgagctcagtgggcaggaggacgccttccgcagctgggccgtgcaaaccttcaaggcagcctgtgagacgtttgatgtccgaggcaaacagcacattcagatccccaagctctacacctccaatgtgacctgggacccgcaccactacaggctcgtgcaggactcacagcctttggacctcagcaaagccctcagcagcatgcatgccaagaacgtgttcaccatgaggctcaaatctcggcagaatctacaaagtccgacatccagccgtgccaccatcctggtggaactctcctgtgaggatggccaaggcctgaactacctgccgggggagcaccttggggtttgcccaggcaaccagccggccctggtccaaggcatcctggagcgagtggtggatggccccacaccccaccagacagtgcgcctggaggccctggatgagagtggcagctactgggtcagtgacaagaggctgcccccctgctcactcagccaggccctcacctacttcctggacatcaccacacccccaacccagctgctgctccaaaagctggcccaggtggccacagaagagcctgagagacagaggctggaggccctgtgccagccctcagagtacagcaagtggaagttcaccaacagccccacattcctggaggtgctagaggagttcccgtccctgcgggtgtctgctggcttcctgctttcccagctccccattctgaagcccaggttctactccatcagctcctcccgggatcacacgcccacagagatccacctgactgtggccgtggtcacctaccacacccgagatggccagggtcccctgcaccacggcgtctgcagcacatggctcaacagcctgaagccccaagacccagtgccctgctttgtgcggaatgccagcggcttccacctccccgaggatccctcccatccttgcatcctcatcgggcctggcacaggcatcgcgcccttccgcagtttctggcagcaacggctccatgactcccagcacaagggagtgcggggaggccgcatgaccttggtgtttgggtgccgccgcccagatgaggaccacatctaccaggaggagatgctggagatggcccagaagggggtgctgcatgcggtgcacacagcctattcccgcctgcctggcaagcccaaggtctatgttcaggacatcctgcggcagcagctggccagcgaggtgctccgtgtgctccacaaggagccaggccacctctatgtttgcggggatgtgcgcatggcccgggacgtggcccacaccctgaagcagctggtggctgccaagctgaaattgaatgaggagcaggtcgaggactatttctttcagctcaagagccagaagcgctatcacgaagatatctttggtgctgtatttccttacgaggcgaagaaggacagggtggcggtgcagcccagcagcctggagatgtcagcgctctgagggcctacaggaggggttaaagctgccggcacagaacttaaggatggagccagctctgcattatctgaggtcacagggcctggggagatggaggaaagtgatatcccccagcctcaagtcttatttcctcaacgttgctccccatcaagccctttacttgacctcctaacaagtagcaccctggattgatcggagcctcctctctcaaactggggcctccctggtcccttggagacaaaatcttaaatgccaggcctggcaagtgggtgaaagatggaacttgctgctgagtgcaccacttcaagtgaccaccaggaggtgctatcgcaccactgtgtatttaactgccttgtgtacagttatttatgcctctgtatttaaaaaactaacacccagtctgttccccatggccacttgggtcttccctgtatgattccttgatggagatatttacatgaattgcattttactttaatcacaaaaaaaaaaaaaaaa

SEQ ID NO: 39 - DNA, 2828 bp, Homo sapiens
ggcacgaggcgcccgcctgctacgagtagaacgctgtccgcagcttgcgcatttcgcagccgctgccgcctcgccgctgctccttcgtaaggccacttccgcacaccgacaccaacatgaacggacagctcaacggcttccacgaggcgttcatcgaggagggcacattccttttcacctcagagtcggtcggggaaggccacccagataagatttgtgaccaaatcagtgatgctgtccttgatgcccaccttcagcaggatcctgatgccaaagtagcttgtgaaactgttgctaaaactggaatgatccttcttgctggggaaattacatccagagctgctgttgactaccagaaagtggttcgtgaagctgttaaacacattggatatgatgattcttccaaaggttttgactacaagacttgtaacgtgctggtagccttggagcaacagtcaccagatattgctcaaggtgttcatcttgacagaaatgaagaagacattggtgctggagaccagggcttaatgtttggctatgccactgatgaaactgaggagtgtatgcctttaaccattgtcttggcacacaagctaaatgccaaactggcagaactacgccgtaatggcactttgccttggttacgccctgattctaaaactcaagttactgtgcagtatatgcaggatcgaggtgctgtgcttcccatcagagtccacacaattgttatatctgttcagcatgatgaagaggtttgtcttgatgaaatgagggatgccctaaaggagaaagtcatcaaagcagttgtgcctgcgaaataccttgatgaggatacaatctaccacctacagccaagtggcagatttgttattggtgggcctcagggtgatgctggtttgactggacgcaaaatcattgtggacacttatggcggttggggtgctcatggaggaggtgccttttcaggaaaggattataccaaggtcgaccgttcagctgcttatgctgctcgttgggtggcaaaatcccttgttaaaggaggtctgtgccggagggttcttgttcaggtctcttatgctattggagtttctcatccattatctatctccattttccattatggtacctctcagaagagtgagagagagctattagagattgtgaagaagaatttcgatctccgccctggggtcattgtcagggatctggatctgaagaagccaatttatcagaggactgcagcctatggccactttggtagggacagcttcccatgggaagtgcccaaaaagcttaaatattgaaagtgttagccttttttccccagacttgttggcgtaggctacagagaagccttcaagctctgagggaaagggccctccttcctaaattttcctgtcctctttcagctcctgaccagttgcagtcactctagtcaatgacatgaattttagcttttgtgggggactgtaagttgggcttgctattctgtccctaggtgttttgttcaccattataatgaatttagtgagcataggtgatccatgtaactgcctagaaacaacactgtagtaaataatgctttgaaattgaacctttgtgccctatcacccaacgctccaaagtcataattgcattgactttccccaccagatgctgaaaatgtccttgtgatgtgcacgtaaagtacttgtagttccacttatagcctctgtctggcaatgccacagccctgtcagcatgaatttgtaatgtcttgagctctattatgaatgtgaagccttccccttatcctccctgtaacttgatccatttctaattatgtagctctttgtcagggagtgttccctatccaatcaatcttgcatgtaacgcaagttcccagttggagctccagcctgacatcaaaaaaggcagttaccattaaaccatctccctggtgcttatgctcttaattgccacctctaacagcaccaaatcaaaatctctccactttcagctgtcttttggaggacgtacgtaataaggttttaatttagtaaaccaatcctatgcatggtttcagcactagccaaacctcaccaactcctagttctagaaaaacaggcacttggcagccttgtgatgtcatacagagaagtcacagggcagtacctgagggtctgtaggttgcacactttggtaccagataacttttttttttctttataagaaagcctgagtactccacactgcacaataactcctcccagggttttaactttgttttattttcaaaaccaggtccaatgagctttctgaacagctggtgtagctacagagaaaccagcttccttcagagagcagtgcttttggcggggaggaggaaatcccttcatacttgaacgttttctaattgcttatttattgtattctggggtatggcgtaagtacagagaagccatcacctcagatggcagcttttaaaagattttttttttttctctcaacaccatgattcctttaacaacatgtttccagcattcccaggtaggccaaggtgtcctacagaaaaaccttgggttagacctacagggggtctggctggtgttaacagaagggagggcagagctggtgcggctggccatggagaaagctgacttggctggtgtggtacagagaagccagcttgtttacatgcttattccatgactgcttgccctaagcagaaagtgcctttcaggatctatttttggaggtttattacgtatgtctggttctcaattccaacagtttaatgaagatctaaataaaatgctaggttctaccttaaaaaaaaaaaaaaaaaa

SEQ ID NO: 40 - DNA, 2077 bp, Homo sapiens
ccgagcgccagcgcggggaaccgggaaaaggaaaccgtgttgtgtacgtaagattcaggaaacgaaaccaggagccgcgggtgttggcgcaaaggttactcccagacccttttccggctgacttctgagaaggttgcgcacagctgtgcccggcagtctagaggcgcagaagaggaagccatcgcctggccccggctctctggaccttgtctcgctcgggagcggaaacagcggcagccagagaactgttttaatcatggacaaacaaaactcacagatgaatgcttctcacccggaaacaaacttgccagttgggtatcctcctcagtatccaccgacagcattccaaggacctccaggatatagtggctaccctgggccccaggtcagctacccacccccaccagccggccattcaggtcctggcccagctggctttcctgtcccaaatcagccagtgtataatcagccagtatataatcagccagttggagctgcaggggtaccatggatgccagcgccacagcctccattaaactgtccacctggattagaatatttaagtcagatagatcagatactgattcatcagcaaattgaacttctggaagttttaacaggttttgaaactaataacaaatatgaaattaagaacagctttggacagagggtttactttgcagcggaagatactgattgctgtacccgaaattgctgtgggccatctagaccttttaccttgaggattattgataatatgggtcaagaagtcataactctggagagaccactaagatgtagcagctgttgttgtccctgctgccttcaggagatagaaatccaagctcctcctggtgtaccaataggttatgttattcagacttggcacccatgtctaccaaagtttacaattcaaaatgagaaaagagaggatgtactaaaaataagtggtccatgtgttgtgtgcagctgttgtggagatgttgattttgagattaaatctcttgatgaacagtgtgtggttggcaaaatttccaagcactggactggaattttgagagaggcatttacagacgctgataactttggaatccagttccctttagaccttgatgttaaaatgaaagctgtaatgattggtgcctgtttcctcattgacttcatgttttttgaaagcactggcagccaggaacaaaaatcaggagtgtggtagtggattagtgaaagtctcctcaggaaatctgaagtctgtatattgattgagactatctaaactcatacctgtatgaattaagctgtaaggcctgtagctctggttgtatacttttgcttttcaaattatagtttatcttctgtataactgatttataaaggtttttgtacattttttaatactcattgtcaatttgagaaaaaggacatatgagtttttgcatttattaatgaaacttcctttgaaaaactgctttgaattatgatctctgattcattgtccattttactaccaaatattaactaaggccttattaatttttatataaattatatcttgtcctattaaatctagttacaatttatttcatgcataagagctaatgttattttgcaaatgccatatattcaaaaaagctcaaagataattttctttactattatgttcaaataatattcaatatgcatattatctttaaaaagttaaatgtttttttaatcttcaagaaatcatgctacacttaacttctcctagaagctaatctataccataatattttcatattcacaagatattaaattaccaattttcaaattattgttagtaaagaacaaaatgattctctcccaaagaaagacacattttaaatactccttcactctaaaactctggtattataacttttgaaagttaatatttctacatgaaatgtttagctcttacactctatccttcctagaaaatggtaattgagattactcagatattaattaaatacaatatcatatatatattcacagagtataaacctaaataatgatctattagattcaaatatttgaaataaaaacttgatttttttgt

SEQ ID NO: 41 - DNA, 3503 bp, Homo sapiens
atggggggatgcacggtgaagcctcagctgctgctcctggcgctcgtcctccacccctggaatccctgtctgggtgcggactcggagaagccctcgagcatccccacagataaattattagtcataactgtagcaacaaaagaaagtgatggattccatcgatttatgcagtcagccaaatatttcaattatactgtgaaggtccttggtcaaggagaagaatggagaggtggtgatggaattaatagtattggagggggccagaaagtgagattaatgaaagaagtcatggaacactatgctgatcaagatgatctggttgtcatgtttactgaatgctttgatgtcatatttgctggtggtccagaagaagttctaaaaaaattccaaaaggcaaaccacaaagtggtctttgcagcagatggaattttgtggccagataaaagactagcagacaagtatcctgttgtgcacattgggaaacgctatctgaattcaggaggatttattggctatgctccatatgtcaaccgtatagttcaacaatggaatctccaggataatgatgatgatcagctcttttacactaaagtttacattgatccactgaaaagggaagctattaacatcacattggatcacaaatgcaaaattttccagaccttaaatggagctgtagatgaagttgttttaaaatttgaaaatggcaaagccagagctaagaatacattttatgaaacattaccagtggcaattaatggaaatggacccaccaagattctcctgaattattttggaaactatgtacccaattcatggacacaggataatggctgcactctttgtgaattcgatacagtcgacttgtctgcagtagatgtccatccaaacgtatcaataggtgtttttattgagcaaccaaccccttttctacctcggtttctggacatattgttgacactggattacccaaaagaagcacttaaactttttattcataacaaagaagtttatcatgaaaaggacatcaaggtattttttgataaagctaagcatgaaatcaaaactataaaaatagtaggaccagaagaaaatctaagtcaagcggaagccagaaacatgggaatggacttttgccgtcaggatgaaaagtgtgattattactttagtgtggatgcagatgttgttttgacaaatccaaggactttaaaaattttgattgaacaaaacagaaagatcattgctcctcttgtaactcgtcatggaaagctgtggtccaatttctggggagcattgagtcctgatggatactatgcacgatctgaagattatgtggatattgttcaagggaatagagtaggagtatggaatgtcccatatatggctaatgtgtacttaattaaaggaaagacactccgatcagagatgaatgaaaggaactattttgttcgtgataaactggatcctgatatggctctttgccgaaatgctagagaaatgggtgtatttatgtacatttctaatagacatgaatttggaaggctattatccactgctaattacaatacttcccattataacaatgacctctggcagatttttgaaaatcctgtggactggaaggaaaagtatataaaccgtgattattcaaagattttcactgaaaatatagttgaacagccctgtccagatgtcttttggttccccatattttctgaaaaagcctgtgatgaattggtagaagaaatggaacattacggcaaatggtctgggggaaaacatcatgatagccgtatatctggtggttatgaaaatgtcccaactgatgatatccacatgaagcaagttgatctggagaatgtatggcttgattttatccgggagttcattgcaccagttacactgaaggtctttgcaggctattatacgaagggatttgcactactgaattttgtagtaaaatactcccctgaacgacagcgttctcttcgtcctcatcatgatgcttctacatttaccataaacattgcacttaataacgtgggagaagactttcagggaggtggttgcaaatttctaaggtacaattgctctattgagtcaccacgaaaaggctggagcttcatgcatcctgggagactcacacatttgcatgaaggacttcctgttaaaaatggaacaagatacattgcagtgtcatttatagatccctaagttatttacttttcattgaattgaaatttattttgggtgaatgactggcatgaacacgtctttgaagttgtggctgagaagatgagaggaatatttaaataacatcaacagaacaacttcactttgggccaaacatttgaaaaactttttataaaaaattgtttgatatttcttaatgtctgctctgagccttaaaacacagattgaagaagaaaagaaagaaaaaacttaaatatttatttctatgctttgttgcctctgagaataatgacaatttatgaatttgtgtttcaaattgataaaatatttaggtacaaataacaagactaataatattttcttatttaaaaaaagcatgggaagatttttatttatcaaaatatagaggaaatgtagacaaaatggatataaatgaaaattaccatgttgtaaaaccttgaaaatcagattctaactgattgtatgcaactaagtatttctgaacacctatgcaggtcttatttacagtgttactaagggaacacacaaagaattacacaacgttttcctcaagaaaatggtacaaaacacaaccgaggagcgtatacagttgaaaacatttttgttttgattggaaggcagattattttatattagtattaaaaatcaaaccctatgtttctttcagatgaatcttccaaagtggattatattaagcaggtattagatttagaaaacctttccatttcttaaagtattatcaagtgtcaagatcagcaagtgtccttaagtcaaataggtttttttttgttggtggttgtgcttgctttccttttttagaaagttctagaaaataggaaaacgaaaaatttcattgagatgagtagtgcatttaattattttttaaaaaactttttaagtacttgaattttatatcaggaaaacaaagttgttgagccttgcttcttccgttttgccctttgtctcgctccttattcttttttggggggagggttatttgcttttttatcttcctggcataatttccattttattcttctgagtgtctatgttaacttccctctatcccgcttataaaaaaattctccaacaaaaatacttgttgacttgatgttttatcacttctctaagtaaggttgaaatatccttattgtagctactgtttttaatgtaaaggttaaacttgaaaagaaattcttaatcacggtgccaaaattcattttctaacaccatgtgttagaaaattataaaaaataaaataattttaaaaaaaaaaaaaaaaaaaaaaa

SEQ ID NO: 42 - DNA, 3445 bp, Homo sapiens
gagtgactccaccgcccggagcagcggtgcaggacgcgcgtctccgccgcccgcggtgacttctgcctgcgctccttctctgaacgctcacttccgaggagacgccgacgatgaagacaccgtggaaggttcttctgggactgctgggtgctgctgcgcttgtcaccatcatcaccgtgcccgtggttctgctgaacaaaggcacagatgatgctacagctgacagtcgcaaaacttacactctaactgattacttaaaaaatacttatagactgaagttatactccttaagatggatttcagatcatgaatatctctacaaacaagaaaataatatcttggtattcaatgctgaatatggaaacagctcagttttcttggagaacagtacatttgatgagtttggacattctatcaatgattattcaatatctcctgatgggcagtttattctcttagaatacaactacgtgaagcaatggaggcattcctacacagcttcatatgacatttatgatttaaataaaaggcagctgattacagaagagaggattccaaacaacacacagtgggtcacatggtcaccagtgggtcataaattggcatatgtttggaacaatgacatttatgttaaaattgaaccaaatttaccaagttacagaatcacatggacggggaaagaagatataatatataatggaataactgactgggtttatgaagaggaagtcttcagtgcctactctgctctgtggtggtctccaaacggcacttttttagcatatgcccaatttaacgacacagaagtcccacttattgaatactccttctactctgatgagtcactgcagtacccaaagactgtacgggttccatatccaaaggcaggagctgtgaatccaactgtaaagttctttgttgtaaatacagactctctcagctcagtcaccaatgcaacttccatacaaatcactgctcctgcttctatgttgataggggatcactacttgtgtgatgtgacatgggcaacacaagaaagaatttctttgcagtggctcaggaggattcagaactattcggtcatggatatttgtgactatgatgaatccagtggaagatggaactgcttagtggcacggcaacacattgaaatgagtactactggctgggttggaagatttaggccttcagaacctcattttacccttgatggtaatagcttctacaagatcatcagcaatgaagaaggttacagacacatttgctatttccaaatagataaaaaagactgcacatttattacaaaaggcacctgggaagtcatcgggatagaagctctaaccagtgattatctatactacattagtaatgaatataaaggaatgccaggaggaaggaatctttataaaatccaacttagtgactatacaaaagtgacatgcctcagttgtgagctgaatccggaaaggtgtcagtactattctgtgtcattcagtaaagaggcgaagtattatcagctgagatgttccggtcctggtctgcccctctatactctacacagcagcgtgaatgataaagggctgagagtcctggaagacaattcagctttggataaaatgctgcagaatgtccagatgccctccaaaaaactggacttcattattttgaatgaaacaaaattttggtatcagatgatcttgcctcctcattttgataaatccaagaaatatcctctactattagatgtgtatgcaggcccatgtagtcaaaaagcagacactgtcttcagactgaactgggccacttaccttgcaagcacagaaaacattatagtagctagctttgatggcagaggaagtggttaccaaggagataagatcatgcatgcaatcaacagaagactgggaacatttgaagttgaagatcaaattgaagcagccagacaattttcaaaaatgggatttgtggacaacaaacgaattgcaatttggggctggtcatatggagggtacgtaacctcaatggtcctgggatcgggaagtggcgtgttcaagtgtggaatagccgtggcgcctgtatcccggtgggagtactatgactcagtgtacacagaacgttacatgggtctcccaactccagaagacaaccttgaccattacagaaattcaacagtcatgagcagagctgaaaattttaaacaagttgagtacctccttattcatggaacagcagatgataacgttcactttcagcagtcagctcagatctccaaagccctggtcgatgttggagtggatttccaggcaatgtggtatactgatgaagaccatggaatagctagcagcacagcacaccaacatatatatacccacatgagccacttcataaaacaatgtttctctttaccttagcacctcaaaataccatgccatttaaagcttattaaaactcatttttgttttcattatctcaaaactgcactgtcaagatgatgatgatctttaaaatacacactcaaatcaagaaacttaaggttacctttgttcccaaatttcatacctatcatcttaagtagggacttctgtcttcacaacagattattaccttacagaagtttgaattatccggtcgggttttattgtttaaaatcatttctgcatcagctgctgaaacaacaaataggaattgtttttatggaggctttgcatagattccctgagcaggattttaatctttttctaactggactggttcaaatgttgttctcttctttaaagggatggcaagatgtgggcagtgatgtcactagggcagggacaggataagagggattagggagagaagatagcagggcatggctgggaacccaagtccaagcataccaacacgagcaggctactgtcagctcccctcggagaagagctgttcacagccagactggcacagttttctgagaaagactattcaaacagtctcaggaaatcaaatatgcaaagcactgacttctaagtaaaaccacagcagttgaaaagactccaaagaaatgtaagggaaactgccagcaacgcaggcccccaggtgccagttatggctataggtgctacaaaaacacagcaagggtgatgggaaagcattgtaaatgtgcttttaaaaaaaaatactgatgttcctagtgaaagaggcagcttgaaactgagatgtgaacacatcagcttgccctgttaaaagatgaaaatatttgtatcacaaatcttaacttgaaggagtccttgcatcaatttttcttatttcatttctttgagtgtcttaattaaaagaatattttaacttccttggactcattttaaaaaatggaacataaaatacaatgttatgtattattattcccattctacatactatggaatttctcccagtcatttaataaatgtgccttcattttttc

SEQ ID NO: 43 - DNA, 1527 bp, Homo sapiens
ggcctggcccagttgcaccacgagcgctgcggacactcggggcggcagtcggtctgtcagtcctcccgccaggtcccgcggcccgcacctgccgcccgcacctgcagctccgcacctgcggccagtgcctactgccctctcttgccgcccgcacctgcagccccgcacctgccgcttgcacctgcagccccgcgctctacccggttcaagcatggctgaccaggcgcccttcgacacggacgtcaacaccctgacccgcttcgtcatggaggagggcaggaaggcccgcggcacgggcgagttgacccagctgctcaactcgctctgcacagcagtcaaagccatctcttcggcggtgcgcaaggcgggcatcgcgcacctctatggcattgctggttctaccaacgtgacaggtgatcaagttaagaagctggacgtcctctccaacgacctggttatgaacatgttaaagtcatcctttgccacgtgtgttctcgtgtcagaagaagataaacacgccatcatagtggaaccggagaaaaggggtaaatatgtggtctgttttgatccccttgatggatcttccaacatcgattgccttgtgtccgttggaaccatttttggcatctatagaaagaaatcaactgatgagccttctgagaaggatgctctgcaaccaggccggaacctggtggcagccggctacgcactgtatggcagtgccaccatgctggtccttgccatggactgtggggtcaactgcttcatgctggacccggccatcggggagttcattttggtggacaaggatgtgaagataaaaaagaaaggtaaaatctacagccttaacgagggctacgccagggactttgaccctgccgtcactgagtacatccagaggaagaagttccccccagataattcagctccttatggggcccggtatgtgggctccatggtggctgatgttcatcgcactctggtctacggagggatatttctgtaccccgctaacaagaagagccccaatggaaagctgagactgctgtacgaatgcaaccccatggcctacgtcatggagaaggctgggggaatggccaccactgggaaggaggccgtgttagacgtcattcccacagacattcaccagagggcgccggtgatcttgggatcccccgacgacgtgctcgagttcctgaaggtgtatgagaagcactctgcccagtgagcacctgccctgcctgcatccggagaattgcctctacctggaccttttgtctcacacagcagtaccctgacctgctgtgcaccttacattcctagagagcagaaataaaaagcatgactatttccaccatcaaatgctgtagaatgcttggcactccctaaccaaatgctgtctccataatgccactggtgttaagatatattttgagtggatggaggagaaataaacttattcctccttaaaaaaaaaaaaaaaaaaaaaaaaaaaaaaaaaaaaaaaaaaaaaaaaaaaaaaaaaaa

SEQ ID NO: 44 - DNA, 4238 bp, Homo sapiens
ggggaagagaggcacagacacagataggagaagggcaccggctggagccacttgcaggactgagggtttttgcaacaaaaccctagcagcctgaagaactctaagccagatggggtggctggacgagagcagctcttggctcagcaaagaatgcacagtatgatcagctcagtggatgtgaagtcagaagttcctgtgggcctggagcccatctcacctttagacctaaggacagacctcaggatgatgatgcccgtggtggaccctgttgtccgtgagaagcaattgcagcaggaattacttcttatccagcagcagcaacaaatccagaagcagcttctgatagcagagtttcagaaacagcatgagaacttgacacggcagcaccaggctcagcttcaggagcatatcaaggaacttctagccataaaacagcaacaagaactcctagaaaaggagcagaaactggagcagcagaggcaagaacaggaagtagagaggcatcgcagagaacagcagcttcctcctctcagaggcaaagatagaggacgagaaagggcagtggcaagtacagaagtaaagcagaagcttcaagagttcctactgagtaaatcagcaacgaaagacactccaactaatggaaaaaatcattccgtgagccgccatcccaagctctggtacacggctgcccaccacacatcattggatcaaagctctccaccccttagtggaacatctccatcctacaagtacacattaccaggagcacaagatgcaaaggatgatttcccccttcgaaaaactgcctctgagcccaacttgaaggtgcggtccaggttaaaacagaaagtggcagagaggagaagcagccccttactcaggcggaaggatggaaatgttgtcacttcattcaagaagcgaatgtttgaggtgacagaatcctcagtcagtagcagttctccaggctctggtcccagttcaccaaacaatgggccaactggaagtgttactgaaaatgagacttcggttttgccccctacccctcatgccgagcaaatggtttcacagcaacgcattctaattcatgaagattccatgaacctgctaagtctttatacctctccttctttgcccaacattaccttggggcttcccgcagtgccatcccagctcaatgcttcgaattcactcaaagaaaagcagaagtgtgagacgcagacgcttaggcaaggtgttcctctgcctgggcagtatggaggcagcatcccggcatcttccagccaccctcatgttactttagagggaaagccacccaacagcagccaccaggctctcctgcagcatttattattgaaagaacaaatgcgacagcaaaagcttcttgtagctggtggagttcccttacatcctcagtctcccttggcaacaaaagagagaatttcacctggcattagaggtacccacaaattgccccgtcacagacccctgaaccgaacccagtctgcacctttgcctcagagcacgttggctcagctggtcattcaacagcaacaccagcaattcttggagaagcagaagcaataccagcagcagatccacatgaacaaactgctttcgaaatctattgaacaactgaagcaaccaggcagtcaccttgaggaagcagaggaagagcttcagggggaccaggcgatgcaggaagacagagcgccctctagtggcaacagcactaggagcgacagcagtgcttgtgtggatgacacactgggacaagttggggctgtgaaggtcaaggaggaaccagtggacagtgatgaagatgctcagatccaggaaatggaatctggggagcaggctgcttttatgcaacaggtaataggcaaagatttagctccaggatttgtaattaaagtcattatctgaacatgaaatgcattgcaggtttggtaaatggatatgatttcctatcagtttatatttctctatgatttgagttcagtgtttaaggattctacctaatgcagatatatgtatatatctatatagaggtctttctatatactgatctctatatagatatcaatgtttcattgaaaatccactggtaaggaaatacctgttatactaaaattatgatacataatatctgagcagttaataggctttaaatttatcccaaagcctgctacaccaattacttctaaagaaaacaaattcactgttattttgagtttatgtgttgagatcagtgactgctggatagtctcccagtctgatcaatgaagcattcgattagtttttgattttttgcaacatctagaatttaattttcacatcactgtacataatgtatcatactatagtcttgaacactgttaaaggtagtctgccccttccttcctctctctttttttagttaagtagaaatgttctggtcaccatgccagtagtcctaggttattgtgtaggttgcaattgaacatattaggaatacaggtggttttaaatatatagatgcaaattgcagcactactttaaatattagattatgtctcacatagcactgctcattttacttttattttgtgtaatttgatgacactgtctatcaaaaaagagcaaatgaagcagatgcaaatgttagtgagaagtaatgtgcagcattatggtccaatcagatacaatattgtgtctacaattgcaaaaaacacagtaacaggatgaatattatctgatatcaagtcaaaatcagtttgaaaagaaggtgtatcatattttatattgtcactagaatctcttaagtataattccataatgacatgggcatataccgtaacattctggcaaataacaattagaaaagataggtttaacaaaaaaatttacttgtatataatgcaccttcaggaggactatgtcctttgatgctataaaatacaaacaactttgaaggcaacagaagacactgtttattcaagtcagttctttgtcaggttcctgctgttctcctacagaaaagtgattctgtgagggtgaacaggaaatgccttgtggaaacaggaagtccaagtgattcatgtactgaggaatgtaggaaaaaaaatctgaggatagtgctttactctttctgtttttaaagggcactctatgaattgatttattgtctaagaaaataacaccacaagtagggaaattgttacggaagcttttcactggaacatttccttcatattcccttttgatatgtttaccttgttttataggtttacttttgttaagctagttaaaggttcgttgtattaagacccctttaatatggataatccaaattgacctagaatctttgtgaggttttttctattaaaatatttatatttctaaatccgaggtatttcaaggtgtagtatcctatttcaaaggagatatagcagttttgccaaatgtagacattgttcaactgtatgttattggcacgtgttgtttacattttgctgtgacatttaaaaatatttctttaaaaatgttactgctaaagatacattatccttttttaaaaagtctccattcaaattaaattaacataactagaagttagaaagtttaaaagttttccacataatgaaagtccttctgataatttgacaaatagctataataggaacactccctatcaccaacatattttggttagtatattccttcatattaaaatgactttttgtcagttgttttgcattaaaaatatggcatgcctaagataaaattgtatattttttccatctcataaatattcattttcttcaaagtcttttttcaatctcataaaaaagggatagtgcatcttttaaaatacattttatttggggaggaacatgtggctgagcagacttttgtataatattacttcaaagatatgtaatcacaaacaaaaaaaactattttttataatgtcatttgagagagtttcatcagtacagttggtggacgttaattgtttgaatttgatagtctttgaatttaatcaagaaactacctggaaccagtgaaaaggaaagctggacttaaataatcttagaattaattgataaatgtctcttttaaaatctactgtatttattataatttacacccttgaaggtgatctcttgttttgtgttgtaaatatattgtttgtatgtttcccttcttgccttctgttataagtctcttcctttctcaaataaagttttttttaaaag

SEQ ID NO: 45 - DNA, 3186 bp, Homo sapiens
ggggaagagaggcacagacacagataggagaagggcaccggctggagccacttgcaggactgagggtttttgcaacaaaaccctagcagcctgaagaactctaagccagatggggtggctggacgagagcagctcttggctcagcaaagaatgcacagtatgatcagctcagtggatgtgaagtcagaagttcctgtgggcctggagcccatctcacctttagacctaaggacagacctcaggatgatgatgcccgtggtggaccctgttgtccgtgagaagcaattgcagcaggaattacttcttatccagcagcagcaacaaatccagaagcagcttctgatagcagagtttcagaaacagcatgagaacttgacacggcagcaccaggctcagcttcaggagcatatcaaggaacttctagccataaaacagcaacaagaactcctagaaaaggagcagaaactggagcagcagaggcaagaacaggaagtagagaggcatcgcagagaacagcagcttcctcctctcagaggcaaagatagaggacgagaaagggcagtggcaagtacagaagtaaagcagaagcttcaagagttcctactgagtaaatcagcaacgaaagacactccaactaatggaaaaaatcattccgtgagccgccatcccaagctctggtacacggctgcccaccacacatcattggatcaaagctctccaccccttagtggaacatctccatcctacaagtacacattaccaggagcacaagatgcaaaggatgatttcccccttcgaaaaactgcctctgagcccaacttgaaggtgcggtccaggttaaaacagaaagtggcagagaggagaagcagccccttactcaggcggaaggatggaaatgttgtcacttcattcaagaagcgaatgtttgaggtgacagaatcctcagtcagtagcagttctccaggctctggtcccagttcaccaaacaatgggccaactggaagtgttactgaaaatgagacttcggttttgccccctacccctcatgccgagcaaatggtttcacagcaacgcattctaattcatgaagattccatgaacctgctaagtctttatacctctccttctttgcccaacattaccttggggcttcccgcagtgccatcccagctcaatgcttcgaattcactcaaagaaaagcagaagtgtgagacgcagacgcttaggcaaggtgttcctctgcctgggcagtatggaggcagcatcccggcatcttccagccaccctcatgttactttagagggaaagccacccaacagcagccaccaggctctcctgcagcatttattattgaaagaacaaatgcgacagcaaaagcttcttgtagctggtggagttcccttacatcctcagtctcccttggcaacaaaagagagaatttcacctggcattagaggtacccacaaattgccccgtcacagacccctgaaccgaacccagtctgcacctttgcctcagagcacgttggctcagctggtcattcaacagcaacaccagcaattcttggagaagcagaagcaataccagcagcagatccacatgaacaaactgctttcgaaatctattgaacaactgaagcaaccaggcagtcaccttgaggaagcagaggaagagcttcagggggaccaggcgatgcaggaagacagagcgccctctagtggcaacagcactaggagcgacagcagtgcttgtgtggatgacacactgggacaagttggggctgtgaaggtcaaggaggaaccagtggacagtgatgaagatgctcagatccaggaaatggaatctggggagcaggctgcttttatgcaacagcctttcctggaacccacgcacacacgtgcgctctctgtgcgccaagctccgctggctgcggttggcatggatggattagagaaacaccgtctcgtctccaggactcactcttcccctgctgcctctgttttacctcacccagcaatggaccgccccctccagcctggctctgcaactggaattgcctatgaccccttgatgctgaaacaccagtgcgtttgtggcaattccaccacccaccctgagcatgctggacgaatacagagtatctggtcacgactgcaagaaactgggctgctaaataaatgtgagcgaattcaaggtcgaaaagccagcctggaggaaatacagcttgttcattctgaacatcactcactgttgtatggcaccaaccccctggacggacagaagctggaccccaggatactcctaggtgatgactctcaaaagtttttttcctcattaccttgtggtggacttggggtggacagtgacaccatttggaatgagctacactcgtccggtgctgcacgcatggctgttggctgtgtcatcgagctggcttccaaagtggcctcaggagagctgaagaatgggtttgctgttgtgaggccccctggccatcacgctgaagaatccacagccatggggttctgcttttttaattcagttgcaattaccgccaaatacttgagagaccaactaaatataagcaagatattgattgtagatctggatgttcaccatggaaacggtacccagcaggccttttatgctgaccccagcatcctgtacatttcactccatcgctatgatgaagggaactttttccctggcagtggagccccaaatgaggttggaacaggccttggagaagggtacaatataaatattgcctggacaggtggccttgatcctcccatgggagatgttgagtaccttgaagcattcaggaccatcgtgaagcctgtggccaaagagtttgatccagacatggtcttagtatctgctggatttgatgcattggaaggccacacccctcctctaggagggtacaaagtgacggcaaaatgttttggtcatttgacgaagcaattgatgacattggctgatggacgtgtggtgttggctctagaaggaggacatgatctcacagccatctgtgatgcatcagaagcctgtgtaaatgcccttctaggaaatgagctggagccacttgcagaagatattctccaccaaagcccgaatatgaatgctgttatttctttacagaagatcattgaaattcaaagtatgtctttaaagttctcttaa

SEQ ID NO: 46 - DNA, 2790 bp, Homo sapiens
ggggaagagaggcacagacacagataggagaagggcaccggctggagccacttgcaggactgagggtttttgcaacaaaaccctagcagcctgaagaactctaagccagatggggtggctggacgagagcagctcttggctcagcaaagaatgcacagtatgatcagctcagtggatgtgaagtcagaagttcctgtgggcctggagcccatctcacctttagacctaaggacagacctcaggatgatgatgcccgtggtggaccctgttgtccgtgagaagcaattgcagcaggaattacttcttatccagcagcagcaacaaatccagaagcagcttctgatagcagagtttcagaaacagcatgagaacttgacacggcagcaccaggctcagcttcaggagcatatcaaggaacttctagccataaaacagcaacaagaactcctagaaaaggagcagaaactggagcagcagaggcaagaacaggaagtagagaggcatcgcagagaacagcagcttcctcctctcagaggcaaagatagaggacgagaaagggcagtggcaagtacagaagtaaagcagaagcttcaagagttcctactgagtaaatcagcaacgaaagacactccaactaatggaaaaaatcattccgtgagccgccatcccaagctctggtacacggctgcccaccacacatcattggatcaaagctctccaccccttagtggaacatctccatcctacaagtacacattaccaggagcacaagatgcaaaggatgatttcccccttcgaaaaactgcctctgagcccaacttgaaggtgcggtccaggttaaaacagaaagtggcagagaggagaagcagccccttactcaggcggaaggatggaaatgttgtcacttcattcaagaagcgaatgtttgaggtgacagaatcctcagtcagtagcagttctccaggctctggtcccagttcaccaaacaatgggccaactggaagtgttactgaaaatgagacttcggttttgccccctacccctcatgccgagcaaatggtttcacagcaacgcattctaattcatgaagattccatgaacctgctaagtctttatacctctccttctttgcccaacattaccttggggcttcccgcagtgccatcccagctcaatgcttcgaattcactcaaagaaaagcagaagtgtgagacgcagacgcttaggcaaggtgttcctctgcctgggcagtatggaggcagcatcccggcatcttccagccaccctcatgttactttagagggaaagccacccaacagcagccaccaggctctcctgcagcatttattattgaaagaacaaatgcgacagcaaaagcttcttgtagctggtggagttcccttacatcctcagtctcccttggcaacaaaagagagaatttcacctggcattagaggtacccacaaattgccccgtcacagacccctgaaccgaacccagtctgcacctttgcctcagagcacgttggctcagctggtcattcaacagcaacaccagcaattcttggagaagcagaagcaataccagcagcagatccacatgaacaaactgctttcgaaatctattgaacaactgaagcaaccaggcagtcaccttgaggaagcagaggaagagcttcagggggaccaggcgatgcaggaagacagagcgccctctagtggcaacagcactaggagcgacagcagtgcttgtgtggatgacacactgggacaagttggggctgtgaaggtcaaggaggaaccagtggacagtgatgaagatgctcagatccaggaaatggaatctggggagcaggctgcttttatgcaacagcctttcctggaacccacgcacacacgtgcgctctctgtgcgccaagctccgctggctgcggttggcatggatggattagagaaacaccgtctcgtctccaggactcactcttcccctgctgcctctgttttacctcacccagcaatggaccgccccctccagcctggctctgcaactggaattgcctatgaccccttgatgctgaaacaccagtgcgtttgtggcaattccaccacccaccctgagcatgctggacgaatacagagtatctggtcacgactgcaagaaactgggctgctaaataaatgtgagcgaattcaaggtcgaaaagccagcctggaggaaatacagcttgttcattctgaacatcactcactgttgtatggcaccaaccccctggacggacagaagctggaccccaggatactcctaggtgatgactctcaaaagtttttttcctcattaccttgtggtggacttggggtggacagtgacaccatttggaatgagctacactcgtccggtgctgcacgcatggctgttggctgtgtcatcgagctggcttccaaagtggcctcaggagagctgaagaatgggtttgctgttgtgaggccccctggccatcacgctgaagaatccacagccatggggttctgcttttttaattcagttgcaattaccgccaaatacttgagagaccaactaaatataagcaagatattgattgtagatctggatgttcaccatggaaacggtacccagcaggccttttatgctgaccccagcatcctgtacatttcactccatcgctatgatgaagggaactttttccctggcagtggagccccaaatgaggttcggtttatttctttagagccccacttttatttgtatctttcaggtaattgcattgcatga

SEQ ID NO: 47 - DNA, 2693 bp, Homo sapiens
cgaaaaaagaggggaagagtattaaagaccatttctggctgggcagggcactctcagcagctcaactgcccagcgtgaccagtggccacctctgcagtgtcttccacaacctggtcttgactcgtctgctgaacaaatcctctgacctcaggccggctgtgaacgtagttcctgagagatagcaaacatgcccaacagtgagcccgcatctctgctggagctgttcaacagcatcgccacacaaggggagctcgtaaggtccctcaaagcgggaaatgcgtcaaaggatgaaattgattctgcagtaaagatgttggtgtcattaaaaatgagctacaaagctgccgcgggggaggattacaaggctgactgtcctccagggaacccagcacctaccagtaatcatggcccagatgccacagaagctgaagaggattttgtggacccatggacagtacagacaagcagtgcaaaaggcatagactacgataagctcattgttcggtttggaagtagtaaaattgacaaagagctaataaaccgaatagagagagccaccggccaaagaccacaccacttcctgcgcagaggcatcttcttctcacacagagatatgaatcaggttcttgatgcctatgaaaataagaagccattttatctgtacacgggccggggcccctcttctgaagcaatgcatgtaggtcacctcattccatttattttcacaaagtggctccaggatgtatttaacgtgcccttggtcatccagatgacggatgacgagaagtatctgtggaaggacctgaccctggaccaggcctatggcgatgctgttgagaatgccaaggacatcatcgcctgtggctttgacatcaacaagactttcatattctctgacctggactacatggggatgagctcaggtttctacaaaaatgtggtgaagattcaaaagcatgttaccttcaaccaagtgaaaggcattttcggcttcactgacagcgactgcattgggaagatcagttttcctgccatccaggctgctccctccttcagcaactcattcccacagatcttccgagacaggacggatatccagtgccttatcccatgtgccattgaccaggatccttactttagaatgacaagggacgtcgcccccaggatcggctatcctaaaccagccctgttgcactccaccttcttcccagccctgcagggcgcccagaccaaaatgagtgccagcgacccaaactcctccatcttcctcaccgacacggccaagcagatcaaaaccaaggtcaataagcatgcgttttctggagggagagacaccatcgaggagcacaggcagtttgggggcaactgtgatgtggacgtgtctttcatgtacctgaccttcttcctcgaggacgacgacaagctcgagcagatcaggaaggattacaccagcggagccatgctcaccggtgagctcaagaaggcactcatagaggttctgcagcccttgatcgcagagcaccaggcccggcgcaaggaggtcacggatgagatagtgaaagagttcatgactccccggaagctgtccttcgactttcagtagcactcgttttacatatgcttataaaagaagtgatgtatcagtaatgtatcaataatcccagcccagtcaaagcaccgccacctgtaggcttctgtctcatggtaattactgggcctggcctctgtaagcctgtgtatgttatcaatactgtttcttcctgtgagttccattatttctatctcttatgggcaaagcattgtgggtaattggtgctggctaacattgcatggtcggatagagaagtccagctgtgagtctctccccaaagcagccccacagtggagccttcggctggaagtccatgggccaccctgttcttgtccatggaggacttccgagggttccaagtatactcttaagacccactctgtttaaaaatatatattctatgtatgcgtatatggaattgaaatgtcattattgtaacctagaaagtgctttgaaatattgatgtggggaggtttattgagcacaagatgtatttcagcccatgccccctcccaaaaagaaattgataagtaaaagcttcgttatacatttgactaagaaatcacccagctttaaagctgcttttaacaatgaagattgaacagagttcagcaattttgattaaattaagacttgggggtgaaactttccagtttactgaactccagaccatgcatgtagtccactccagaaatcatgctcgcttcccttggcacaccagtgttctcctgccaaatgaccctagaccctctgtcctgcagagtcagggtggcttttcccctgactgtgtccgatgccaaggagtcctggcctccgcagatgcttcattttgacccttggctgcagtggaagtcagcacagagcagtgccctggctgtgtcctggacgggtggacttagctagggagaaagtcgaggcagcagccctcgaggccctcacagatgtctaggcaggcctcatttcatcacgcagcatgtgcaggcctggaagagcaaagccaaatctcagggaagtccttggttgatgtatctgggtctcctctggagcactctgccctcctgtcacccagtagagtaaataaacttccttggctcctaaaaaa

SEQ ID NO: 48 - DNA, 1427 bp, Homo sapiens
ctgggaatatgattatgcttaatctatgctcagtcgaaaggggctggggctgctttctcccctcccttcttgactctctgttcacagaactcaggctgcctccagccagcctttgcccgctagactcactggccctgagcacttgaaggtgcagcaagtcactgagaatgagcactttcttctcggacacagcatggatctgcctggctgtccccacagtactatgtgggacagtattttgcaaatacaagaagagctcagggcagctgtggagctggatggtctgcctggcaggcctctgtgcagtctgcctgctcatcctgtcccctttttggggcttgatcctcttctcggtgtcatgcttcctcatgtatacttacttatctggccaagaattgttacctgtggatcagaaggcagtcctggtgacaggtggtgattgcgggcttggccatgctttgtgcaagtatctggatgagctgggcttcacggtatttgccggagttttgaatgaaaatggcccaggagctgaggaattgcgaagaacctgctctccgcgcctctcggtgctccaaatggacatcacgaagccagtgcagataaaagatgcttacagcaaggttgcagcaatgctgcaggacagaggactgtgggctgtgatcaacaatgctggggtgcttggctttccaactgatggggagcttcttcttatgactgactacaaacaatgcatggccgtgaacttctttggaactgtggaggtcacaaagacgtttttgcctcttcttagaaaatccaaagggaggctggtgaatgtcagcagcatgggaggaggggccccaatggaaaggctggcatcttatggctcatcaaaggcggctgtgaccatgttctcatcagttatgagactggagctttccaagtggggaattaaagttgcttccatccaacctggaggcttcctaacaaatatcgcaggcaccagtgacaagtgggaaaagctggagaaggacattctggaccacctccccgctgaggtacaggaagactacggccaggactacatcttagcacagcggaatttcctcctattgatcaactcgttagccagcaaggacttctctccggtgctgcgggacatccagcatgctatcttggcgaagagcccttttgcctattacacgccagggaaaggcgcttacttgtggatctgccttgctcactatttgcctattggcatatatgattactttgctaaaagacattttggccaagacaagcccatgcccagagctctaagaatgcctaactacaagaaaaaggccacctaggcaatggaagccctcaaagaagtcggaatgtcatagtcttgaaatgaaagggaaactgggaaactgggtttctcattaaagttgtttcccactctg

SEQ ID NO: 49 - DNA, 4407 bp, Homo sapiens
tttcgactcgcgctccggctgctgtcacttggctctctggctggagcttgaggacgcaaggagggtttgtcactggcagactcgagactgtaggcactgccatggcccctgtgctcagtaaggactcggcggacatcgagagtatcctggctttaaatcctcgaacacaaactcatgcaactctgtgttccacttcggccaagaaattagacaagaaacattggaaaagaaatcctgataagaactgctttaattgtgagaagctggagaataattttgatgacatcaagcacacgactcttggtgagcgaggagctctccgagaagcaatgagatgcctgaaatgtgcagatgccccgtgtcagaagagctgtccaactaatcttgatattaaatcattcatcacaagtattgcaaacaagaactattatggagctgctaagatgatattttctgacaacccacttggtctgacttgtggaatggtatgtccaacctctgatctatgtgtaggtggatgcaatttatatgccactgaagagggacccattaatattggtggattgcagcaatttgctactgaggtattcaaagcaatgagtatcccacagatcagaaatccttcgctgcctcccccagaaaaaatgtctgaagcctattctgcaaagattgctctttttggtgctgggcctgcaagtataagttgtgcttcctttttggctcgattggggtactctgacatcactatatttgaaaaacaagaatatgttggtggtttaagtacttctgaaattcctcagttccggctgccgtatgatgtagtgaattttgagattgagctaatgaaggaccttggtgtaaagataatttgcggtaaaagcctttcagtgaatgaaatgactcttagcactttgaaagaaaaaggctacaaagctgctttcattggaataggtttgccagaacccaataaagatgccatcttccaaggcctgacgcaggaccaggggttttatacatccaaagactttttgccacttgtagccaaaggcagtaaagcaggaatgtgcgcctgtcactctccattgccatcgatacggggagtcgtgattgtacttggagctggagacactgccttcgactgtgcaacatctgctctacgttgtggagctcgccgagtgttcatcgtcttcagaaaaggctttgttaatataagagctgtccctgaggagatggagcttgctaaggaagaaaagtgtgaatttctgccattcctgtccccacggaaggttatagtaaaaggtgggagaattgttgctatgcagtttgttcggacagagcaagatgaaactggaaaatggaatgaagatgaagatcagatggtccatctgaaagccgatgtggtcatcagtgcctttggttcagttctgagtgatcctaaagtaaaagaagccttgagccctataaaatttaacagatggggtctcccagaagtagatccagaaactatgcaaactagtgaagcatgggtatttgcaggtggtgatgtcgttggtttggctaacactacagtggaatcggtgaatgatggaaagcaagcttcttggtacattcacaaatacgtacagtcacaatatggagcttccgtttctgccaagcctgaactacccctcttttacactcctattgatctggtggacattagtgtagaaatggccggattgaagtttataaatccttttggtcttgctagcgcaactccagccaccagcacatcaatgattcgaagagcttttgaagctggatggggttttgccctcaccaaaactttctctcttgataaggacattgtgacaaatgtttcccccagaatcatccggggaaccacctctggccccatgtatggccctggacaaagctcctttctgaatattgagctcatcagtgagaaaacggctgcatattggtgtcaaagtgtcactgaactaaaggctgacttcccagacaacattgtgattgctagcattatgtgcagttacaataaaaatgactggacggaacttgccaagaagtctgaggattctggagcagatgccctggagttaaatttatcatgtccacatggcatgggagaaagaggaatgggcctggcctgtgggcaggatccagagctggtgcggaacatctgccgctgggttaggcaagctgttcagattcctttttttgccaagctgaccccaaatgtcactgatattgtgagcatcgcaagagctgcaaaggaaggtggtgccaatggcgttacagccaccaacactgtctcaggtctgatgggattaaaatctgatggcacaccttggccagcagtggggattgcaaagcgaactacatatggaggagtgtctgggacagcaatcagacctattgctttgagagctgtgacctccattgctcgtgctctgcctggatttcccattttggctactggtggaattgactctgctgaaagtggtcttcagtttctccatagtggtgcttccgtcctccaggtatgcagtgccattcagaatcaggatttcactgtgatcgaagactactgcactggcctcaaagccctgctttatctgaaaagcattgaagaactacaagactgggatggacagagtccagctactgtgagtcaccagaaagggaaaccagttccacgtatagctgaactcatggacaagaaactgccaagttttggaccttatctggaacagcgcaagaaaatcatagcagaaaacaagattagactgaaagaacaaaatgtagctttttcaccacttaagagaagctgttttatccccaaaaggcctattcctaccatcaaggatgtaataggaaaagcactgcagtaccttggaacatttggtgaattgagcaacgtagagcaagttgtggctatgattgatgaagaaatgtgtatcaactgtggtaaatgctacatgacctgtaatgattctggctaccaggctatacagtttgatccagaaacccacctgcccaccataaccgacacttgtacaggctgtactctgtgtctcagtgtttgccctattgtcgactgcatcaaaatggtttccaggacaacaccttatgaaccaaagagaggcgtacccttatctgtgaatccggtgtgttaaggtgatttgtgaaacagttgctgtgaactttcatgtcacctacatatgctgatctcttaaaatcatgatccttgtgttcagctctttccaaattaaaacaaatatacattttctaaataaaaatatgtaatttcaaaatacatttgtaagtgtaaaaaatgtctcatgtcaatgaccattcaattagtggcataaaatagaataattcttttctgaggatagtagttaaataactgtgtggcagttaattggatgttcactgccagttgtcttatgtgaaaaattaactttttgtgtggcaattagtgtgacagtttccaaattgccctatgctgtgctccatatttgatttctaattgtaagtgaaattaagcattttgaaacaaagtactctttaacatacaagaaaatgtatccaaggaaacattttatcaataaaaattacctttaattttaatgctgtttctaagaaaatgtagttagctccataaagtacaaatgaagaaagtcaaaaattatttgctatggcaggataagaaagcctaaaattgagtttgtggactttattaagtaaaatccccttcgctgaaattgcttatttttggtgttggatagaggatagggagaatatttactaactaaataccattcactactcatgcgtgagatgggtgtacaaactcatcctcttttaatggcatttctctttaaactatgttcctaaccaaatgagatgataggatagatcctggttaccactcttttactgtgcacatatgggccccggaattctttaatagtcaccttcatgattatagcaactaatgtttgaacaaagctcaaagtatgcaatgcttcattattcaagaatgaaaaatataatgttgataatatatattaagtgtgccaaatcagtttgactactctctgttttagtgtttatgtttaaaagaaatatattttttgttattattagataatatttttgtatttctctattttcataatcagtaaatagtgtcatataaactcatttatctcctcttcatggcatcttcaatatgaatctataagtagtaaatcagaaagtaacaatctatggcttatttctatgacaaattcaagagctagaaaaataaaatgtttcattatgcacttttagaaatgcatatttgccacaaaacctgtattactgaataatatcaaataaaatatcataaagcatttt

SEQ ID NO: 50 - DNA, 2699 bp, Homo sapiens
ggcacgaggcaggcggcgaggagagcggtgccttgcagggatgctgcgggcgggagcaccaaccggggacttaccccgggcgggagaagtccacaccgggaccaccatcatggcagtggagtttgacgggggcgttgtgatgggttctgattcccgagtgtctgcaggcgaggcggtggtgaaccgagtgtttgacaagctgtccccgctgcacgagcgcatctactgtgcactctctggttcagctgctgatgcccaagccgtggccgacatggccgcctaccagctggagctccatgggatagaactggaggaacctccacttgttttggctgctgcaaatgtggtgagaaatatcagctataaatatcgagaggacttgtctgcacatctcatggtagctggctgggaccaacgtgaaggaggtcaggtatatggaaccctgggaggaatgctgactcgacagccttttgccattggtggctccggcagcacctttatctatggttatgtggatgcagcatataagccaggcatgtctcccgaggagtgcaggcgcttcaccacagacgctattgctctggccatgagccgggatggctcaagcgggggtgtcatctacctggtcactattacagctgccggtgtggaccatcgagtcatcttgggcaatgaactgccaaaattctatgatgagtgaaccttccccagacttctctttcttattttgtaataaactctctagggccaaaacctggtatggtcattgggaaatgagtgctcagggagatggagcttaggggaggtgggtgcttccctcctagatgtcagcatacactctttcttcttttgtcccaggtctaaaacatctttcctagagaaaacaaaagggactaaactagaaatataaagagccctatacatgacaggtgatcacgtactgaatgattttgtagtacaaacaataaaaattctcattccgcatcatcatgcggtccatgatgatgaggccgcaaaaaaaaaaaaaaaaaaaaaaaactcgagactagttctctctctctccctcgtgccgaattcggcacgaggtgtaatcccagctactcgggaggctgagacagaagaatcacttgagcccaggaggcggaggttgcggtgagcagagattgcgccattgcactccagcctgggcgacaaagcgagactccatctcaaaaaaaacaaaaaaattagcatttacggaattctgaaattttgggctattaaatttctacatcatctaagtgccctcttggcaatctttcacatcctctcatggcatctgatccagaaggctcaaacctgatctgagtactagtgtgttcctcctactcacttctgtttctattaactaataagtgtagtaatgaaagccagtattagggacaaattttacatgactttcttctcaaacctggacctttattgaacctctgcctccctttttcattagtatgaaagtatgtatcttaaagggttgctctacgaattaaatggatcagtaaatataaagaaagcgcctagcaaagtgcctagtacaaaataaacgcccaactgttattgttactattgttttaaattctagtttccttaccccttaacatacattttcagttatacaaaagttgaacgtttccctggagattgccaaaattctctgaacggtttcaagagatctgtcctattcttcacctacacacaaaaaagtactaatcatcacacacaggctacctaagccacctgaccttacctcccattagctgtccctgtaccatctaactaaaatgtacagatacatacttgtggccaggcacggtggctcacgcctgtaatcacagcactttgggaggccaaggcaggcggatcacctgaggtcaggagtttcagactagtctggccaacatggagaaaccccgtttctactaaaaatgcaaaaattagctgggcttggtggtgcacacctgtagtgccagctactcgcgagactgaggcaggagaattgcttgaacccgggaggcgggggttgcagtgagccgagatccggccactacactccagcctgggaaacagagcgatactctgtctcaaaaaaacagaaagacaaaaaaacggatacatactggaaccctgaaaactttttcagtagcatttagaccttctctcatatacagcattgtaaaatccattgctttgcttttagctgcactatgtgccccaatatcatcaaatggcatttggccttctctttacagactgaaaaggcacattacagatcttaaatatgctagtagtagatcaatgggcagtgtgttattcagaatacagtattctgtgatggttttctaatctcagtgacagtaggtggttaaattaaatgtttatggccaggtgcggtggctcacacctataatcccagcactttgggaggccaagccaaggtgggcagatcttttaaggtcaggagttcaagatcagcctgaccaatatggtgaaagcctgtctccactgaaaatacaaaaaattagctgggtgtggtggcgcacccctgtaatctcagctacccgggaggtagagtttgcagtgagcagagattgtgccactgcactccagtctggacgacagagtgagactccatctcaaaaataaaaaaaaaaaaaaaaaaa

SEQ ID NO: 51 - DNA, 1377 bp, Homo sapiens
aacgaaaccaacagcagtccaagctcagtcagcagaagagataaaagcaaacaggtctgggaggcagttctgttgccactctctctcctgtcaatgatggatctcagaaataccccagccaaatctctggacaagttcattgaagactatctcttgccagacacgtgtttccgcatgcaaatcaaccatgccattgacatcatctgtgggttcctgaaggaaaggtgcttccgaggtagctcctaccctgtgtgtgtgtccaaggtggtaaagggtggctcctcaggcaagggcaccaccctcagaggccgatctgacgctgacctggttgtcttcctcagtcctctcaccacttttcaggatcagttaaatcgccggggagagttcatccaggaaattaggagacagctggaagcctgtcaaagagagagagcattttccgtgaagtttgaggtccaggctccacgctggggcaacccccgtgcgctcagcttcgtactgagttcgctccagctcggggagggggtggagttcgatgtgctgcctgcctttgatgccctgggtcagttgactggcagctataaacctaacccccaaatctatgtcaagctcatcgaggagtgcaccgacctgcagaaagagggcgagttctccacctgcttcacagaactacagagagacttcctgaagcagcgccccaccaagctcaagagcctcatccgcctagtcaagcactggtaccaaaattgtaagaagaagcttgggaagctgccacctcagtatgccctggagctcctgacggtctatgcttgggagcgagggagcatgaaaacacatttcaacacagcccagggatttcggacggtcttggaattagtcataaactaccagcaactctgcatctactggacaaagtattatgactttaaaaaccccattattgaaaagtacctgagaaggcagctcacgaaacccacgcctgtgatcctggacccggcggaccctacaggaaacttgggtggtggagacccaaagcgttggaggcagctggcacaagaggctgaggcctggctgaattacccatgctttaagaattgggatgggtccccagtgagctcctggattctgctggtgagacctcctgcttcctccctgccattcatccctgcccctctccatgaagcttgagacatatagctggagaccattctttccaaagaacttacctcttgccaaaggccatttatattcatatagtgacaggctgtgctccatattttacagtcattttggtcacaatcgagggtttctggaattttcacatcccttgtccagaattcattcccctaagagtaataataaataatctctaacacc

SEQ ID NO: 52 - DNA, 1590 bp, Homo sapiens
gaggcagttctgttgccactctctctcctgtcaatgatggatctcagaaataccccagccaaatctctggacaagttcattgaagactatctcttgccagacacgtgtttccgcatgcaaatcgaccatgccattgacatcatctgtgggttcctgaaggaaaggtgcttccgaggtagctcctaccctgtgtgtgtgtccaaggtggtaaagggtggctcctcaggcaagggcaccaccctcagaggccgatctgacgctgacctggttgtcttcctcagtcctctcaccacttttcaggatcagttaaatcgccggggagagttcatccaggaaattaggagacagctggaagcctgtcaaagagagagagcactttccgtgaagtttgaggtccaggctccacgctggggcaacccccgtgcgctcagcttcgtactgagttcgctccagctcggggagggggtggagttcgatgtgctgcctgcctttgatgccctgggtcagttgactggcagctataaacctaacccccaaatctatgtcaagctcatcgaggagtgcaccgacctgcagaaagagggcgagttctccacctgcttcacagaactacagagagacttcctgaagcagcgccccaccaagctcaagagcctcatccgcctagtcaagcactggtaccaaaattgtaagaagaagcttgggaagctgccacctcagtatgccctggagctcctgacggtctatgcttgggagcgagggagcatgaaaacacatttcaacacagcccaaggatttcggacggtcttggaattagtcataaactaccagcaactctgcatctactggacaaagtattatgactttaaaaaccccattattgaaaagtacctgagaaggcagctcacgaaacccaggcctgtgatcctggacccggcggaccctacaggaaacttgggtggtggagacccaaagggttggaggcagctggcacaagaggctgaggcctggctgaattacccatgctttaagaattgggatgggtccccagtgagctcctggattctgctggctgaaagcaacagtacagacgatgagaccgacgatcccaggacgtatcagaaatatggttacattggaacacatgagtaccctcatttctctcatagacccagcacgctccaggcagcatccaccccacaggcagaagaggactggacctgcaccatcctctgaatgccagtgcatcttgggggaaagggctccagtgttatctggaccagttccttcattttcaggtgggactcttgatccagagaagacaaagctcctcagtgagctggtgtataatccaagacagaacccaagtctcctgactcctggccttctatgccctctatcctatcatagataacattctccacagcctcacttcattccacctattctctgaaaatattccctgagagagaacagagagatttagataagagaatgaaattccagccttgactttcttctgtgcacctgatgggagggtaatgtctaatgtattatcaataacaataaaaataaagcaaataccaaaaa

SEQ ID NO: 53 - DNA, 3257 bp, Homo sapiens
aacaggcgtgacgccagttctaaacttgaaacaaaacaaaacttcaaagtacaccaaaatagaacctccttaaagcataaatctcacggagggtctcggccgccagtggaaggagccaccgcccccgccccgaccatggccgaggagctggtcttagagaggtgtgatctggagctggagaccaatggccgagaccaccacacggccgacctgtgccgggagaagctggtggtgcgacggggccagcccttctggctgaccctgcactttgagggccgcaactaccaggccagtgtagacagtctcaccttcagtgtcgtgaccggcccagcccctagccaggaggccgggaccaaggcccgttttccactaagagatgctgtggaggagggtgactggacagccaccgtggtggaccagcaagactgcaccctctcgctgcagctcaccaccccggccaacgcccccatcggcctgtatcgcctcagcctggaggcctccactggctaccagggatccagctttgtgctgggccacttcattttgctcttcaacgcctggtgcccagcggatgctgtgtacctggactcggaagaggagcggcaggagtatgtcctcacccagcagggctttatctaccagggctcggccaagttcatcaagaacataccttggaattttgggcagtttcaagatgggatcctagacatctgcctgatccttctagatgtcaaccccaagttcctgaagaacgccggccgtgactgctcccggcgcagcagccccgtctacgtgggccgggtgggtagtggcatggtcaactgcaacgatgaccagggtgtgctgctgggacgctgggacaacaactacggggacggcgtcagccccatgtcctggatcggcagcgtggacatcctgcggcgctggaagaaccacggctgccagcgcgtcaagtatggccagtgctgggtcttcgccgccgtggcctgcacagtgctgaggtgcctaggcatccctacccgcgtcgtgaccaactacaactcggcccatgaccagaacagcaaccttctcatcgagtacttccgcaatgagtttggggagatccagggtgacaagagcgagatgatctggaacttccactgctgggtggagtcgtggatgaccaggccggacctgcagccggggtacgagggctggcaggccctggacccaacgccccaggagaagagcgaaggaacgtactgctgtggcccagttccagttcgtgccatcaaggagggcgacctgagcaccaagtacgatgcgccctttgtctttgcggaggtcaatgccgacgtggtagactggatccagcaggacgatgggtctgtgcacaaatccatcaaccgttccctgatcgttgggctgaagatcagcactaagagcgtgggccgagacgagcgggaggatatcacccacacctacaaatacccagaggggtcctcagaggagagggaggccttcacaagggcgaaccacctgaacaaactggccgagaaggaggagacagggatggccatgcggatccgtgtgggccagagcatgaacatgggcagtgactttgacgtctttgcccacatcaccaacaacaccgctgaggagtacgtctgccgcctcctgctctgtgcccgcaccgtcagctacaatgggatcttggggcccgagtgtggcaccaagtacctgctcaacctaaccctggagcctttctctgagaagagcgttcctctttgcatcctctatgagaaataccgtgactgccttacggagtccaacctcatcaaggtgcgggccctcctcgtggagccagttatcaacagctacctgctggctgagagggacctctacctggagaatccagaaatcaagatccggatccttggggagcccaagcagaaacgcaagctggtggctgaggtgtccctgcagaacccgctccctgtggccctggaaggctgcaccttcactgtggagggggccggcctgactgaggagcagaagacggtggagatcccagaccccgtggaggcaggggaggaagttaaggtgagaatggacctcgtgccgctccacatgggcctccacaagctggtggtgaacttcgagagcgacaagctgaaggctgtgaagggcttccggaatgtcatcattggccccgcctaagggacccctgctcccagcctgctgagagcccccaccttgatcccaatccttatcccaagctagtgagcaaaatatgccccttattgggccccagaccccagggcagggtgggcagcctatgggggctctcggaaatggaatgtgcccctggcccatctcagcctcctgagcctgtgggtccccactcaccccctttgctgtgaggaatgctctgtgccagaaacagtgggagccctgacctgtgctgactggggctggggtgagagaggaaagacctacattccctctcctgcccagatgccctttggaaagccattgaccacccaccatattgtttgatctacttcatagctccttggagcaggcaaaaaagggacagcatgcccttggctggatcaggaatccagctccctagactgcatcccgtacctcttcccatgactgcacccagctccaggggcccttgggacacccagagctgggtggggacagtgataggcccaaggtcccctccacatcccagcagcccaagcttaatagccctccccctcaacctcaccattgtgaagcacctactatgtgctgggtgcctcccacacttgctggggctcacggggcctccaacccatttaatcaccatgggaaactgttgtgggcgctgcttccaggataaggagactgaggcttagagagaggaggcagccccctccacaccagtggcctcgtggttataagcaaggctgggtaatgtgaaggcccaagagcagagtctgggcctctgactctgagtccactgctccatttataaccccagcctgacctgagactgtcgcagaggctgtctggggcctttatcaaaaaaagactcagccaagacaaggaggtagagaggggactgggggactgggagtcagagccctggctgggttcaggtcccacgtctggccagcgactgccttctcctctctgggcctttgtttccttgttggtcagaggagtgattgaacctgctcatctccaaggatcctctccactccatgtttgcaatacacaattcc

SEQ ID NO: 54 - DNA, 3068 bp, Homo sapiens
cggcagccagctgagagcaatgggaaatggggagtcccagctgtcctcggtgcctgctcagaagctgggttggtttatccaggaatacctgaagccctacgaagaatgtcagacactgatcgacgagatggtgaacaccatctgtgacgtctgcaggaaccccgaacagttccccctggtgcagggagtggccataggtggctcctatggacggaaaacagtcttaagaggcaactccgatggtacccttgtccttttcttcagtgacttaaaacaattccaggatcagaagagaagccaacgtgacatcctcgataaaactggggataagctgaagttctgtctgttcacgaagtggttgaaaaacaatttcgagatccagaagtcccttgatgggtccaccatccaggtgttcacaaaaaatcagagaatctctttcgaggtgctggccgccttcaacgctctgagcttaaatgataatcccagcccctggatctatcgagagctcaaaagatccttggataagacaaatgccagtcctggtgagtttgcagtctgcttcactgaactccagcagaagttttttgacaaccgtcctggaaaactaaaggatttgatcctcttgataaagcactggcatcaacagtgccagaaaaaaatcaaggatttaccctcgctgtctccgtatgccctggagctgcttacggtgtatgcctgggaacaggggtgcagaaaagacaactttgacattgctgaaggcgtcagaacggttctggagctgatcaaatgccaggagaagctgtgtatctattggatggtcaactacaactttgaagatgagaccatcaggaacatcctgctgcaccagctccaatcagcgaggccagtaatcttggatccagttgacccaaccaataatgtgagtggagataaaatatgctggcaatggctgaaaaaagaagctcaaacctggttgacttctcccaacctggataatgagttacctgcaccatcttggaatgtcctgcctgcaccactcttcacgaccccaggccaccttctggataagttcatcaaggagtttctccagcccaacaaatgcttcctagagcagattgacagtgctgttaacatcatccgtacattccttaaagaaaactgcttccgacaatcaacagccaagatccagattgtccggggaggatcaaccgccaaaggcacagctctgaagactggctctgatgccgatctcgtcgtgttccataactcacttaaaagctacacctcccaaaaaaacgagcggcacaaaatcgtcaaggaaatccatgaacagctgaaagccttttggagggagaaggaggaggagcttgaagtcagctttgagcctcccaagtggaaggctcccagggtgctgagcttctctctgaaatccaaagtcctcaacgaaagtgtcagctttgatgtgcttcctgcctttaatgcactgggtcagctgagttctggctccacacccagccccgaggtttatgcagggctcattgatctgtataaatcctcggacctcccgggaggagagttttctacctgtttcacagtcctgcagcgaaacttcattcgctcccggcccaccaaactaaaggatttaattcgcctggtgaagcactggtacaaagagtgtgaaaggaaactgaagccaaaggggtctttgcccccaaagtatgccttggagctgctcaccatctatgcctgggagcaggggagtggagtgccggattttgacactgcagaaggtttccggacagtcctggagctggtcacacaatatcagcagctcggcatcttctggaaggtcaattacaactttgaagatgagaccgtgaggaagtttctactgagccagttgcagaaaaccaggcctgtgatcttggacccaggcgaacccacaggtgacgtgggtggaggggaccgttggtgttggcatcttctggacaaagaagcaaaggttaggttatcctctccctgcttcaaggatgggactggaaacccaataccaccttggaaagtgccggtaaaagtcatctaaaggaggcgttgtctggaaatagccctgtaacaggcttgaatcaaagaacttctcctactgtagcaacctgaaattaactcagacacaaataaaggaaacccagctcacaggagcttaaacagctggtcagcccccctaagcccccactacaagtgatcctcaggcaggtaaccccagattcatgcactgtagggctgggcgcagcatccctaggtctctacccagtagatgccactagccctcctctcccagtgacaaccaaaagtcttcacatgttcaaacgttcccctgggttcacagatctttctgcctttggcttttggctccaccctctttagctgttaatttgagtacttatggccctgaaagcggccacggtgcctccagatggcaggtttgcaatccaagcaggaagaaggaaaagatacccaaaggtcaagaacacagtgattttattagaagtttcatccgcaaattttcttccatttcattgctcagaatgtcatgtggttacctgtaacttgaaggtggctacaaagatgactgtggaggtggttgcacttgccacccaaggatgtctgccacacctctccaagccctcctacctaccaagatatacctgatatatccaccagatatctcctcagatatacttggttctctccaccaggttctttctttaaagcaggattctcaactttgatacttactcacattgggctagacagttctttgtttggaggctctcttgtgcatgtaggatgttgagcagcatgtgtggcctgtacccagtacatgccacccagttgtgacaattaaaagtgtcttgagactttatcatgtgtcttctgccctaggtgagaacccttgcactacaggaaccctacacccaacctggggggaatgtagggaagaggtgccaagccaaccgtggggttagctctaattattaagttatgcattataaataaataccaaaaaattg

SEQ ID NO: 55 - DNA, 3826 bp, Homo sapiens
gaattcgggtggagtcctgaaggagggcctgatgtcttcatcattctcaaattcttgtaagctctgcgtcgggtgaaaccagacaaagccgcgagcccagggatgggagcacgcgggggacggcctgccggcggggacgacagcattgcgcctgggtgcagcagtgtgcgtctcggggaagggaagatattttaaggcgtgtctgagcagacggggaggcttttccaaacccaggcagcttcgtggcgtgtgcggtttcgacccggtcacacaaagcttcagcatgtcatgtgaggacggtcgggccctgaaaggaacgctctcggaattggccgcggaaaccgatctgcccgttgtgtttgtgaaacagagaaagataggcggccatggtccaaccttgaaggcttatcaggagggcagacttcaaaagctactaaaaatgaacggccctgaagatcttcccaagtcctatgactatgaccttatcatcattggaggtggctcaggaggtctggcagctgctaaggaggcagcccaatatggcaagaaggtgatggtcctggactttgtcactcccacccctcttggaactagatggggtcttggaggaacatgtgtgaatgtgggttgcatacctaaaaaactgatgcatcaagcagctttgttaggacaagccctgcaagactctcgaaattatggatggaaagtcgaggagacagttaagcatgattgggacagaatgatagaagctgtacagaatcacattggctctttgaattggggctaccgagtagctctgcgggagaaaaaagtcgtctatgagaatgcttatgggcaatttattggtcctcacaggattaaggcaacaaataataaaggcaaagaaaaaatttattcagcagagagttttctcattgccactggtgaaagaccacgttacttgggcatccctggtgacaaagaatactgcatcagcagtgatgatcttttctccttgccttactgcccgggtaagaccctggttgttggagcatcctatgtcgctttggagtgcgctggatttcttgctggtattggtttaggcgtcactgttatggttaggtccattcttcttagaggatttgaccaggacatggccaacaaaattggtgaacacatggaagaacatggcatcaagtttataagacagttcgtaccaattaaagttgaacaaattgaagcagggacaccaggccgactcagagtagtagctcagtccaccaatagtgaggaaatcattgaaggagaatataatacggtgatgctggcaataggaagagatgcttgcacaagaaaaattggcttagaaaccgtaggggtgaagataaatgaaaagactggaaaaatacctgtcacagatgaagaacagaccaatgtgccttacatctatgccattggcgatatattggaggataaggtggagctcaccccagttgcaatccaggcaggaagattgctggctcagaggctctatgcaggttccactgtcaagtgtgactatgaaaatgttccaaccactgtatttactcctttggaatatggtgcttgtggcctttctgaggagaaagctgtggagaagtttggggaagaaaatattgaggtttaccatagttacttttggccattggaatggacgattccgtcaagagataacaacaaatgttatgcaaaaataatctgtaatactaaagacaatgaacgtgttgtgggctttcacgtactgggtccaaatgctggagaagttacacaaggctttgcagctgcgctcaaatgtggactgaccaaaaagcagctggacagcacaattggaatccaccctgtctgtgcagaggtattcacaacattgtctgtgaccaagcgctctggggcaagcatcctccaggctggctgctgaggttaagccccagtgtggatgctgttgccaagactgcaaaccactggctcgtttccgtgcccaaatccaaggcgaagttttctagagggttcttgggctcttggcacctgcgtgtcctgtgcttaccaccgcccaaggcccccttggatctcttggataggagttggtgaatagaaggcaggcagcatcacactggggtcactgacagacttgaagctgacatttggcagggcatcgaagggatgcatccatgaagtcaccagtctcaagcccatgtggtaggcggtgatggaacaactgtcaaatcagttttagcatgacctttccttgtggattttcttattctcgttgtcaagttttctagggttgaatttttttcttttttctccatggtgttaatgatattagagatgaaaaacgttagcagttgatttttgtccaaaagcaagtcatggctagagtatccatgcaaggtgtcttgttgcatggaagggatagtttggctcccttggaggctatgtaggcttgtcccgggaaagagaactgtcctgcagctgaaatggactgttctttactgacctgctcagcagtttcttctctcatatattcccaaaacaagtacatctgcgatcaactctagccaaatttgcccctgtgtgctacatgatggatgattattattttaaggtctgtttaggaagggaaatggctacttggccagccattgcctggcatttggtagtatagtatgattctcaccattatttgtcatggaggcagacatacaccagaaatgggggagaaacagtacatatctttctgtctttagtttattgtgtgctggtctaagcaagctgagatcatttgcaatggaaaacacgtaacttgtttaaaagtttttctggtagctttagctttatgctaaaaaaaataatgacattgggtatctatttctttctaagacatacattagtaggaaaataagtcttttcatgcttatgatttagctgttttgtggtaattgctttttaaaggaagttattaatatcataagttattattaatattttgaacacaggtggatgtgaaggattttcatttaaaaaccaagtggttttgactttttctgttgaatgaacaactgtgccttgtggaatttttgcagaagtgtttatgctttgttagcatttcaacttgcattattataaagaggtattaatgcctcagttatgtgtttgtcaatgtactggctgaggattctatctcagctgtcttttctaactgtgtaggttgagttttgaacacgtgcttgtggacatcagcctcctgccagcagttcttgaagcttctttttcattcctgctactctacctgtatttctcagttgcagcactgagtggtcaaaatacatttctgggccacctcagggaacccatgcatctgcctggcatttaggcagcagagcccctgaccgtcccccacaggctctgcctcacgtcctcatctcatttggctgtgtaaagaaatgggaaaagggaaaaggagagagcaattgaggcagttgaccatattcagttttatttatttatttttaatttgtttttttctccaagtccaccagtctctgaaattagaacagtaggcggtatgagataatcaggcctaatcatgttgtgattctcttttcttagtggagtggaatgttctatccccacaagaaggattatatcttatagacttgtcttgttcagattctgtatttacccattttattgaaacatatactaagttccatgtatttttgttacaaatcttctgaaaaaaaacaaaacaatgtgaaacattaaaattaaaaggcattaataataaaaaaaaaaaaaaaaacccgaattc

SEQ ID NO: 56 - DNA, 1223 bp, Homo sapiens
agctcggtcctgctggaggccacgggtgccacacactcggtcccgacatgatggcgagcatgcgagtggtgaaggagctggaggatcttcagaagaagcctcccccatacctgcggaacctgtccagcgatgatgccaatgtcctggtgtggcacgctctcctcctacccgaccaacctccctaccacctgaaagccttcaacctgcgcatcagcttcccgccggagtatccgttcaagcctcccatgatcaaattcacaaccaagatctaccaccccaacgtggacgagaacggacagatttgcctgcccatcatcagcagtgagaactggaagccttgcaccaagacttgccaagtcctggaggccctcaatgtgctggtgaatagaccgaatatcagggagcccctgcggatggacctcgctgacctgctgacacagaatccggagctgttcagaaagaatgccgaagagttcaccctccgattcggagtggaccggccctcctaactcatgttctgaccctctgtgcactggatcctcggcatagcggacggacacacctcatggactgaggccagagccccctgtggcccattccccattcatttttcccttcttaggttgttagtcattagtttgtgtgtgtgtgtggtggagggaagggagctatgagtgtgtgtgttgtgtatggactcactcccaggttcacctggccacaggtgcacccttcccacaccctttacattccccagagccaagggagtttaagtttgcagttacaggccagttctccagctctccatcttagagagacaggtcaccttgcaggcctgcttgcaggaaatgaatccagcagccaactcgaatccccctagggctcaggcactgagggcctggggacagtggagcatatgggtgggagacagatggagggtaccctatttacaactgagtcagccaagccactgatgggaatatacagatttaggtgctaaaccgtttattttccacggatgagtcacaatctgaagaatcaaacttccatcctgaaaatctatatgtttcaaaaccacttgccatcctgttagattgccagttcctgggaccaggcctcagactgtgaagtatatatcctccagcattcagtccagggggagccacggaaaccatgttcttgcttaagccattaaagtcagagatgaaaaaaaaaaaaaaaaaaaa

SEQ ID NO: 57 - DNA, 2699 bp, Homo sapiens
ctaaaggttcctgtagggcggcacaaccagggagggcgtggaagctctgcatcccttctcccataccttgctctacacatctcttcatctgtatcctctgcagcatccttgatgataaaccagtaaatatgagttttgatcatcctgagaaaaatgggccttggcctgcagacccaataaaccttccctcccatggataatagtgctaattcctgaggacctgaagggcctgccgcccctgggggattagccagaagcaggcttgttttcctgctcagaacaaagtgacttccctgaacacatcttcattatgattcacaccaacctgaagaaaaagttcagctgctgcgtcctggtctttcttctgtttgcagtcatctgtgtgtggaaggaaaagaagaaagggagttactatgattcctttaaattgcaaaccaaggaattccaggtgttaaagagtctggggaaattggccatggggtctgattcccagtctgtatcctcaagcagcacccaggacccccacaggggccgccagaccctcggcagtctcagaggcctagccaaggccaaaccagaggcctccttccaggtgtggaacaaggacagctcttccaaaaaccttatccctaggctgcaaaagatctggaagaattacctaagcatgaacaagtacaaagtgtcctacaaggggccaggaccaggcatcaagttcagtgcagaggccctgcgctgccacctccgggaccatgtgaatgtatccatggtagaggtcacagattttcccttcaatacctctgaatgggagggttatctgcccaaggagagcattaggaccaaggctgggccttggggcaggtgtgctgttgtgtcgtcagcgggatctctgaagtcctcccaactaggcagagaaatcgatgatcatgacgcagtcctgaggtttaatggggcacccacagccaacttccaacaagatgtgggcacaaaaactaccattcgcctgatgaactctcagttggttaccacagagaagcgcttcctcaaagacagtttgtacaatgaaggaatcctaattgtatgggacccatctgtataccactcagatatcccaaagtggtaccagaatccggattataatttctttaacaactacaagacttatcgtaagctgcaccccaatcagcccttttacatcctcaagccccagatgccttgggagctatgggacattcttcaagaaatctccccagaagagattcagccaaaccccccatcctctgggatgcttggtatcatcatcatgatgacgctgtgtgaccaggtggatatttatgagttcctcccatccaagcgcaagactgacgtgtgctactactaccagaagttcttcgatagtgcctgcacgatgggtgcctaccacccgctgctctatgagaagaatttggtgaagcatctcaaccagggcacagatgaggacatctacctgcttggaaaagccacactgcctggcttccggaccattcactgctaagcacaggctcctcactcttctccatcaggcattaaatgaatggtctcttggccaccccagcctgggaagaacattttcctgaacaattccagcctgctccttttactctaggggcctctgtcagcaagaccatgggggcttcaagagcctgtggtcaggaaatcaggtccagccttccctgtagccagacagtttatgagcccagagcctcctgccacacacatgcacacatatctagcattctttccagacagcatcctccccgccttccaccttggtagatgcaaggtctatctctcccatcagggctgccaaagctgggctttgtttttcccagcagaatgatgccattctcacaaaccaatgctctatattgcttgaagtctgcatctaaatattgatttcacgttttaaagaaattctcttaaattacaattgtgcccaatgcagggtggctctggggggcaagtaggtggtacaggggattggaaacatcgtccgcgcctccagagaaaagttgctcccgaggtccatgcccctggaacgtgttcctatcactctggctggttgggctggtccttagactgggtgcttatgattaaagggtcttggttagcccactttccctctccatgtggagatggaaggtagagaaggatacagtgtctatcctcaagttgctacggttcagtgagagaggcagacatctgaacaggcaggtaggattcagtgtgctcagtgcactggggatttggagagagatgggcttgctctctctgtgcacccaggagggccacgcacttaaaactgagtttgtggatcagagaaggctttatagcacaggggcattcagatgagtcttagaggaagagaagaaacatggcaagcagattacatctgagccgtttgaattgtgtttttctttcttcccatgtttattttctaagatctacctgaacttagagactcaagatatttttttaggaaacctcctacccatgtctgaggtagcaagtgcagcctcacgacagataccaggcaatccagagccacaaaacgtgattcctccagctctgcctggcctgaccctgtcctgtcagctgggtttacataccagtcccattcttccttttcaatacctacccccaaatcttctcctaaccctaga

SEQ ID NO: 58 - DNA, 1305 bp, Homo sapiens
cgcggctcagtaattgaaggcctgaaacgcccatgtgccactgactaggaggcttccctgctgcggcacttcatgacccagcggcgcgcggcccagtgaagccaccgtggtgtccagcatggccgcgctgctcctgggcgcggtgctgctggtggcccagccccagctagtgccttcccgccccgccgagctaggccagcaggagcttctgcggaaagcggggaccctccaggatgacgtccgcgatggcgtggccccaaacggctctgcccagcagttgccgcagaccatcatcatcggcgtgcgcaagggcggcacgcgcgcactgctggagatgctcagcctgcaccccgacgtggcggccgcggagaacgaggtccacttcttcgactgggaggagcattacagccacggcttgggctggtacctcagccagatgcccttctcctggccacaccagctcacagtggagaagacccccgcgtatttcacgtcgcccaaagtgcctgagcgagtctacagcatgaacccgtccatccggctgctgctcatcctgcgagacccgtcggagcgcgtgctatctgactacacccaagtgttctacaaccacatgcagaagcacaagccctacccgtccatcgaggagttcctggtgcgcgatggcaggctcaatgtggactacaaggccctcaaccgcagcctctaccacgtgcacatgcagaactggctgcgctttttcccgctgcgccacatccacattgtggacggcgaccgcctcatcagggaccccttccctgagatccaaaaggtcgagaggttcctaaagctgtcgccgcagatcaatgcttcgaacttctactttaacaaaaccaagggcttttactgcctgcgggacagcggccgggaccgctgcttacatgagtccaaaggccgggcgcacccccaagtcgatcccaaactactcaataaactgcacgaatattttcatgagccaaataagaagttcttcgagcttgttggcagaacatttgactggcactgatttgcaataagctaagctcagaaactttcctactgtaagttctggtgtacatctgaggggaaaaagaattttaaaaaagcatttaaggtataatttatttgtaaaatccataaagtacttctgtacagtattagattcacaattgccatatatactagttatatttttctacttgttaaatggagggcattttgtattgtttttcatggttgttaacattgtgtaatatgtctctatatgaaggaactaaactatttcactga

SEQ ID NO: 59 - DNA, 2675 bp, Homo sapiens
ctccgcgcgagaatttttttgattccttcttatttggagaaatctccagctgctctgatgatagcctaagaagactgcatgctgcttcctctcgatgccaagccagaccctctcacaacctcggatctcagtccttcatggagacctggtcccagcaggaatggcagtgcaggaaattggcgcccagatggttcttccatgtgaagttgtctcgggctctgggctgacgagagaacacctggtaaccaggtcatggttgagctggggaagtttgaaaggaaggagtttaaaagttccagtttgcaagatggacatacaaaaatggaggaagcacctacgcattttaattcatttcttaagaaagaaggattgaccttcaacaggaaaagaaaatgggaattggacagctaccccattatgctctggtggtccccgctgacgggggagactgggaggttaggccaatgtggagcagatgcttgtttcttcaccatcaaccggacctacctccatcatcacatgaccaaagcattcctcttctatggtactgactttaacatagatagcttacctctgcctcggaaagcccatcatgactgggctgtttttcatgaagagtccccgaaaaacaattataagctctttcataaaccagtgatcaccttgttcaactacactgccacgttcagcaggcattcccacttgccactaactacccaatacttggagagcattgaagtcctgaagtcactccgatacctagttcctttgcagtccaaaaacaagcttagaaaaagacttgctccgctggtgtatgtacagtcagactgtgacccaccatcagacagggacagctatgttcgcgagctgatgacttacatcgaggtcgattcctatggtgaatgtttacgaaacaaagacctccctcagcagctgaaaaatccagcctctatggatgccgatggcttttataggatcattgcacagtataagtttatcctagcttttgagaatgcagtttgtgatgactacatcactgagaagttctggaggccactgaaactgggggtagtccctgtatattacggatcccccagcatcacagactggcttccaagtaacaaaagtgctattcttgtatcagaattttctcaccccagggaactggcaagttacatcagacgactggattctgatgacagattgtatgaggcctatgtagaatggaagctgaagggtgagatctctaaccagcgacttctgacagctgtcagggaacggaaatggggagtgcaagacgtcaaccaggacaattacatcgacgcatttgagtgtatggtgtgcaccaaggtgtgggctaatatcaggcttcaggaaaagggcttaccacccaaaagatgggaggcagaagatacccacctgagttgcccagagcccacagtgtttgctttctcaccactccggactccacctttgagctctttgcgagagatgtggatttccagctttgaacaatccaagaaagaagcccaggcactaaggtggctggttgataggaatcaaaacttttcatctcaagagttttggggcctagtattcaaggactgatttcaaaaatgatcagaatgaaacagactagagccttcttgaggtttattttctaggttgccttaatatttgaacataatagctattctgttgactatccatcaggataataattagttgctgcagtactcataatgagccctttcaaggaatagatgtaaattacccttaggggtagccactatattttttatactaaaaaaggaaatatttcttatggacactggttatcttccatgtccgtgtctgtggacccacatacttactgccttttgtggaaattcacctagagtgagtactttccttgtgcaatggagggagacgatctagctatagattcttgatactcacctcactctcaacagcttattggtatttggcaaacctggtatcctgcagccgagcatgaacatgaaatacattagaacttggcaatgagagatcccatctgttggtttccagggatgtaagtgagtaataaaagctgtttcaagtttatccactatccactcttcaagtgaaaagaacttatgtgtgtctaccttcttctccataccctgagccacctctctcactttctttagttgtgccttgccctatcgcctcccattttcccttcaaagtagaatgtcttgtaaagacacagtaactcctgtgtgttttgattagtgagatgttaccacttaccccttctgctgcgcagaataatattaagaattgctatgcttatgattcaggctggacagcctggacattttgagcagcgcgagagtagaagtgaatacccccaggaactccaattgtgctgaagctgatttgtctgttcgtaggatgatgtgcagcctgtcacagtggcagccacaggcattcagtttgtgggcatttcctgtcatttcggatcctgctatagggaaggttcagctctcctgtctggggcatctactggagcacctcagaagacaaggaggaaaacactggctcatgttttctttccatgtgagggaggggaggtttctagatgatactaaaagcctgttgccactgttgtgtcatgatttccattcttc

SEQ ID NO: 60 - DNA, 6828 bp, Homo sapiens
aatctcccaaggcctaaggaggcaagaggcctgcaaatcgcctcctgctcagcaaacgggttgctcagcaggcccggggtcctggtccaccccaggtccctggtttgcccacctccgatggcggccttcgctggcagggtgggcgcctctggggagccagctccgtcccggcgcctttagagccccatctcttccacgtccctggccttcctccccttccaggcggctgtccccgccggggtccagatggtgtcggagggccggcggttcgacggcgggcccggggttcagcctcccggcctccctccgtccctgactctcctttcttcggagagggcgcgggggccggggccaaagcgccgctcttggggttctcctggactcggagttgccccaggcgggcgcagctctgccccgcggggtgccagcctcgggcgggcaaggtccgtgagtcaccgcctgtaaccgaacaccaggcctccctgccccctcccccagctccggccgccaggctgcggcgacacctacaagaaaatgaaggggcgcccaggcccgcggcggccccggccgtatcgcgagcaggtcccggcggcccccggctcgcggcgctctttcttccccggccccggggctcggccagccgcaaccgccgccccggcgccagcaggaatccaggccgagcgaccggccccggagcccgaggcggcggagggcccgcggtagctgcgactggcgagcccgagagcgcccggggagggggcgcccggcttggaatttcccggtcccttccggcccagcgaggacaaagcactcctggccgccgccgccgccgccgccgtggcctacgccgcgccgcacaaagggcgagtcgcgacacgctcccatccccctcccagctcacggcggccccggccccgggtggctgcagggaggtgggggaagccctggctgcaccgcccctcgctccccctcccctggggccgcgcgagcgccgcccccgccccgtctgcgcgtcctcccggggaggggttggggggcgcggcgccccacataacactccccctcctgcgctgcgagccaccctctcccctccctcctgcaaacaccaccgcctcccctgccaccgccgccacctcgcccgacgctccacagctcgccgcggccggggggcggtgcgcggaccgtgcgcgccgcgggcgccagatgtgcagtccccgccgccgccagtgaccgagccgcagtccgagcggtatcgggccgcctccctgatgctgcgggggcgaccttgagcgtacagcggcttccctcggtggggaccccgacatcccagcgctgtgcccggtcttgccctctgtagcccggctcgccccgcgcttggacatggaaggggccgccgcgcctgtggcgggggaccgccccgacttggggctgggggcgccgggctctccccgagaggcggtggcgggggcgactgcagccctggagcccaggaagccgcacggggtgaagcggcatcaccacaagcacaacttgaagcaccgctacgagctgcaggagaccctgggcaaaggcacctacggcaaagtcaagcgggccaccgagaggttttctggccgagtggttgctataaaatccattcgtaaggacaaaattaaggatgaacaagacatggttcacatcagacgagagattgagatcatgtcatctctcaaccatcctcatatcatcagtatttatgaagtgtttgagaacaaagataagattgtgatcatcatggaatatgccagcaaaggggagctgtacgattacatcagtgagcggcgacgcctcagtgagagggagacccggcacttcttccggcagatcgtctctgctgtgcactattgtcacaagaacggtgtggtccaccgggacttgaagctggaaaatatactgctcgatgacaactgcaatattaagattgctgactttgggctttccaacctgtaccagaaggataagttcttacaaacgttttgtgggagtccactctatgcatctcctgagattgtcaatgggagaccttaccgagggccagaggtggacagctgggccctgggtgtgttgctttacactcttgtttatggaacaatgcccttcgatggtttcgatcacaaaaacctcattcggcaaatcagcagcggagagtaccgggagccaacacagccctcagatgctcgaggactcatacggtggatgctgatggtgaaccccgatcgccgggccactattgaggacattgccaaccactggtgggtgaactggggctataagagcagcgtgtgtgactgtgatgccctccatgactctgagtccccactcctggctcggatcattgactggcaccaccgttccacagggctgcaggctgacaccgaagccaaaatgaagggcctggccaaacccacgacctctgaggtcatgctagagcggcagcggtcgctgaagaaatccaagaaagagaatgactttgctcagtctggtcaggatgcagtgcctgaaagcccatccaagttgagttctaagaggcccaaggggatcctgaagaagcgaagcaacagcgagcatcgctctcacagcactggcttcattgaaggtgtagttggtcctgccttaccctctactttcaagatggagcaggacttgtgcaggactggcgtgctcctcccaagctcaccagaggcagaggtgccgggaaaactcagccccaagcagtcggccacgatgcccaagaaaggcatcttgaaaaagacccagcagagagaatcaggttactactcttccccagagcgcagtgagtcttcggagctgttggacagtaatgatgtgatgggcagcagcatcccctcccccagccccccggacccagccagggtaacctcccacagcctctcctgccggaggaagggcatcttgaaacacagcagcaaatactcagcgggcaccatggacccagccctggtcagccctgaaatgcccacactggaatccctgtcagagcctggtgtccctgccgagggcctctcccggagctacagccgcccttccagtgtcatcagcgatgacagcgtgctgtccagcgactcttttgacttgctggatttgcaggagaatcgccctgcccgccagcgcatccgcagctgcgtctctgcagaaaacttcctccagatccaggactttgaggggctccagaaccggccccggccccagtacctgaagcggtaccggaaccggctggcagacagcagcttctccctcctcacagacatggatgatgtgactcaggtctacaagcaagcgctggagatctgcagcaagctcaactagcattccagggcgcccaggggcgggcgggggtacgagggaggaaggggagcaagacttgggctcacaggctggttacctctttgctggctgtgacaacagactgaaaaaggattggcactgtctcacttggccaagtttgcagccttgagccaacacctaaaagggagaggtgggctcttctgccagttctgtcaattgtcagtcagaatttgggccctgtttggcatttgctttatggcacctcctagaggaccagctgtccaggggaggtggtattgaccggcactcagtgggtggagaggaagcatatgtggaaggagcatttccttagaaatgcttcattcatccagatgcttctggaggaggggcaggagacacttgggctgtttgccttgggcgagcccaaagaacttgccccttttctccttgcattagcaagctaggtctggctgcgtggagctggcaagtagatttcagcaacttgagcttgagttgatgatcaattaatagtggctgccagttgtgctggcgtaagtggcccacatcatggggaaggagtgctgtgattgactagtaatggctaccacgggaaagggaaggggaagcagtagcactaatgctatgtagttgtcatctttgatctggctaggccctgggaatcgggtttagtcatcctgtgggatctgtgttaactctttcatgccactggtgaggcatttgttaatttgctactcaactttgaggaaagacagggccttggtcagagagagaatgctctgaactctgctaaggacatagagtcagcccatggtgatttagctccttgctgttcacctcctctttcctgatgtctgccttgctctacagcacaacctcttgagggtggacagggagaaagatgatggtgtcagaggtcaaaactattatatatgacagggcacaagatggtctgtgatctttgcacagatgaatggaagttgatgcacaccaacaagaggcaacttgtcactttctttctcaatattaactggaatgctgcctcttgggttctcacctgcatggatgctttgagttggatgtgatactgtccatattctccagaggattacctggctgaaccattggctctgttcaccagtgacagatggtttccccatccactgagtgtagcatcctcagaggtaggcaagtttgcttctagggagttagcatgtagatgggatattgggatgaggaaaggaaaatcaggtagatggtgctttttttcccccaaatctaagtattctatgtcatggttttaaactttgccatgaactcctgggctttgggggaagagaaagttccattcatttaaatgaataaggtgttgaaagagtgcagggggttgggaggaagcatgtaagagagggaacatttccttagatgttacccagatggttctgggggagacagaaaagaggtgcggcaggactcttatcttaaaaagtaaacaaaacaaaacaaaacaaaacaaaaaaactagatatgtaatttctaaacacccagatcacaatgacaagatgccactccaaccatgggacaccttcatgatactaggtttgtacttcctggtctctgggatgacttcagattctgctggccaaggcaaattgaactcagttcaagatggccaccactggtagacgtgtagatagaaaagaggactggtcttgggaacatctttggaaaaaccaacaaacaatagttctagggagatgagaaaaaaattcaccttacagtgctaagaaagtgcattagaatggaattgccctttccttaaggagacagtttgggctctccccttgccaccggctctggtgttttggcttatgcgttccttcaggttgagctgagcagtgtgttatgggaagctgctcaatttcctttcattcaattccacctccttcctgaactctaatagaggttaaaagggaaaaaaaaaattctgtagatagcaaattgtgtgtgtgggggggggtgggggtgtgggtgcatggaggacaacctgcaactctgagctccctacttcctgcctcatttcatgcagtcttttctgaacagcctatgctgctgccctgctggccccttgtgcacggcagctggccgtgtccgtagctgtcagtatgacttagatctagctcctacctactggttgatgtgttttttccttttgccaagtgattgagtctgtttagtagtttccatcattctagtctttaagtaaaaatgacactattgaggaaagtcagtctactcccttcttcctccccccaaacacgtgttctcttttgtcaggaaactcagccagtgggctgtggcagagaaagtcctccactcagaggcagagactgagttaagtcataggtggccttaggcatctgcattgtttgcaggggttaagttttccttccagtgagggctggagggatgaattagctggtacctgaagccccgcttagctctgacactctgccaacatcctctgattctaggtgtggtgttgactgtcctttcaaggaaaaacttgcaatagagggaaaagccattaaagcagctccctgcttcatcattaagtcctgtcatccctaccagccaatcccagtcaaagaagttatgctttattcacttctgtggaattacaagtgagagacacttttaggacctgatggacaaagcaggagattcactgtcagctttcctggtcctctccttacttctgtgggccttgcaccgtcttagtttacacatctgccaaaggggtagaattacacttctttttacaggtaaatgtcaaggcacaatcagttttcaggaagtgcttcaagaccccaggtgaaatgaaaatgctaagtaccctctgaatggccatgcctgttaccaggtgctgcttcttcagatgatggggagcacttttcagggtgaaattcaggcgagttttgcccaggcctgctgtcttgagtacaaatgtgaatgatcgactgactgcttgttgccaaactggaaatgttctgtagggatttactggcatggtatcattcctagaagaaaaaaagagagaaacttgactgcacattaaaaaaaaaaaaatccacattgtgacttttatttaatttctattttttttggtaataaaaagttgacttttttatttgaatttgtcttttttatttattggtctgaaaggcatttcaaaggtattataataatatattggtgtaatttaattggtgcaacatgctttatggctcctgtcaaaattggttttcactcatttgattggtttgagcccagaacagcctacaggggaaaaacaagctggataaccacccaaagtgtttgtattttcgttggaaactgatttttgtttcattttggtttttgtttctgtttttatttttaaattaaataaattgcaatgaactg

SEQ ID NO: 61 - DNA, 2283 bp, Homo sapiens
cccacgcgtccgcccacgcgtccgagcctgcgcaggaggccaataggctgccaatactccttggactccccgccagggccctgctgtcagtgcgcctgcgcgcgggtccggcgccgaggttcttgactgctgtgccggacgccaggtgtagccatgcagcgagccgattccgagcagccctccaagcgtccccgttgcgatgacagcccgagaaccccctcaaacaccccttccgcagaggcagactggtccccgggcctggaactccatcccgactacaagacatggggtccggagcaggtgtgctccttcctcaggcgcggtggctttgaagagccggtgctgctgaagaacatccgagaaaatgaaatcacaggcgcattactgccttgtcttgatgagtctcgttttgaaaatcttggggtaagttccttgggggagaggaagaagctgcttagttatatccagcgattggttcaaatccacgttgatacaatgaaggtaattaatgatcctatccatggccacattgagctccatcctctcctcgtccgaatcattgatacacctcaatttcaacgtcttcgatacatcaaacagctgggaggtggttactatgtttttccaggagcttcacacaatcgatttgagcatagtctaggggtggggtatctagcaggatgtctagttcacgcactgggtgaaaaacaaccagagctgcagataagtgaacgagatgttctctgtgttcagattgctggactttgtcatgatctcggtcatgggccattttctcacatgtttgatggacgatttattccacttgctcgcccggaggtgaaatggacgcatgaacaaggctcagttatgatgtttgagcaccttattaattctaatggaattaagcctgtcatggaacaatatggtctcatccctgaagaagatatttgctttataaaggaacaaattgtaggaccacttgaatcacctgtcgaagattcattgtggccatataaagggcgtcctgaaaacaaaagcttcctttatgagatagtatctaataaaagaaatggcattgatgtggacaaatgggattattttgccagggactgccatcatcttgggatccaaaataattttgattacaagcgctttattaagtttgcccgtgtctgtgaagtagacaatgagttgcgtatttgtgctagagataaggaagttggaaatctgtatgacatgttccacactcgcaactctttacaccgtagagcttatcaacacaaagttggcaacattattgatacaatgattacagatgctttcctcaaagcaggtgactacatagagattacaggtgctggaggaaaaaagtatcgcatttctacagcaattgacgacatggaagcctatactaagctgacagataacatttttctggagattttatactctactgatcccaaattgaaagacgcacgagagattttaaaacaaattgaataccgtaatctattcaagtatgtgggtgagacgcagccaacaggacaaataaagattaaaagggaggactatgaatctcttccaaaagaggttgccagtgctaaacccaaagtattgctagacgtgaaactggaggctgaagattttatagtggatgttatcaacatggattatggaatgcaagaaaagaatccaattgatcatgttagcttctattgtaagactgcccccaacagagcaatcaggattactaaaaaccaggtttcacaacttctgccagagaaatttgcagagcagctgattcgagtatattgtaagaaggtggacagaaagagtttgtatgccgcaagacaatattttgttcagtggtgtgcagacagaaatttcaccaagccgcaggatggcgatgttatagccccactcataacgcctcaaaaaaaggaatggaacgacagtacttcagtccaaaatccaactcgcctccgagaagcatccaaaagcagagtccagctttttaaagatgacccaatgtgaatgtctgtagtcagttgtttacaaactccctctcctgcacaattcatttagaggcttcaatcatagaattctgcaaattaatgacaactcatgccttaattttgtattttgaatgtacacgcatgctgaagctaagtaacttttaatcaaagaaataagatggtattaggcaaatcttactatactatgaaaagcattaccttgcctatttttaatattattaaagcctttctccttcgaaaaaaaaaa

SEQ ID NO: 62 - DNA, 2326 bp, Homo sapiens
gtaaatgtaggagaaagagccttggccttaaggaaatctttactcctgtaagcaagagccaacctcacaggattaggagctggggtagaactggctatccttggggaagaggcaagccctgcctctggccgtgtccacctttcaggagactttgagtggcaggtttggacttggactagatgactctcaaaggcccttttagttctgagattccagaaatctgctgcatttcacatggtacctggaacccaacagttcatggatatccactgatatccatgatgctgggtgccccagcgcacacgggatggagaggtgagaactaatgcctagcttgaggggtctgcagtccagtagggcaggcagtcaggtccatgtgcactgcaatgccaggtggagaaatcacagagaggtaaaatggaggccagtgccatttcagaggggaggctcaggaaggcttcttgcttacaggaatgaaggctgggggcattttgctggggggagatgaggcagcctctggaatggctcagggattcagccctccctgccgctgcctgctgaagctggtgactacggggtcgccctttgctcacgtctctctggcccactcatgatggagaagtgtggtcagaggggagcaatgggctttgctgcttatgagcacagaggaattcagtccccaggcagccctgcctctgactccaagagggtgaagtccacagaagtgagctcctgccttagggcctcatttgctcttcatccagggaactgagcacagggggcctccaggagaccctagatgtgctcgtactccctcggcctgggatttcagagctggaaatatagaaaatatctagcccaaagccttcattttaacagatggggaaagtgagcccccaagatgggaaagaaccacacagctaagggagggcctggggagccccaccctagcccttgctgccacaccacattgcctcaacaaccggccccagagtgcccaggcactcctgaggtagcttctggaaatggggacaagtcccctcgaaggaaaggaaatgactagagtagaatgacagctagcagatctcttccctcctgctcccagcgcacacaaacccgccctccccttggtgttggcggtccctgtggccttcactttgttcactacctgtcagcccagcctgggtgcacagtagctgcaactccccattggtgctacctggctctcctgtctctgcagctctacaggtgaggcccagcagagggagtagggctcgccatgtttctggtgagccaatttggctgatcttgggtgtctgaacagctattgggtccaccccagtccctttcagctgctgcttaatgccctgctctctccctggcccaccttatagagagcccaaagagctcctgtaagagggagaactctatctgtggtttataatcttgcacgaggcaccagagtctccctgggtcttgtgatgaactacatttatcccctttcctgccccaaccacaaactctttccttcaaagagggcctgcctggctccctccacccaactgcacccatgagactcggtccaagagtccattccccaggtgggagccaactgtcagggaggtctttcccaccaaacatctttcagctgctgggaggtgaccatagggctctgcttttaaagatatggctgcttcaaaggccagagtcacaggaaggacttcttccagggagattagtggtgatggagaggagagttaaaatgacctcatgtccttcttgtccacggttttgttgagttttcactcttctaatgcaagggtctcacactgtgaaccacttaggatgtgatcactttcaggtggccaggaatgttgaatgtctttggctcagttcatttaaaaaagatatctatttgaaagttctcagagttgtacatatgtttcacagtacaggatctgtacataaaagtttctttcctaaaccattcaccaagagccaatatctaggcattttcttggtagcacaaattttcttattgcttagaaaattgtcctccttgttatttctgtttgtaagacttaagtgagttaggtctttaaggaaagcaacgctcctctgaaatgcttgtcttttttctgttgccgaaatagctggtcctttttcgggagttagatgtatagagtgtttgtatgtaaacatttcttgtaggcatcaccatgaacaaagatatattttctatttatttattatatgtgcacttcaagaagtcactgtcagagaaataaagaattgtcttaaatgtcatgaaaaaaaaaaaaaaaaa

SEQ ID NO: 63 - DNA, 2058 bp, Homo sapiens
gcacgaggaagccacagatctcttaagaactttctgtctccaaaccgtggctgctcgataaatcagacagaacagttaatcctcaatttaagcctgatctaacccctagaaacagatatagaacaatggaagtgacaacaagattgacatggaatgatgaaaatcatctgcgcaactgcttggaaatgtttctttgagtcttctctataagtctagtgttcatggaggtagcattgaagatatggttgaaagatgcagccgtcagggatgtactataacaatggcttacattgattacaatatgattgtagcctttatgcttggaaattatattaatttacgtgaaagttctacagagccaaatgattccctatggttttcacttcaaaagaaaaatgacaccactgaaatagaaactttactcttaaatacagcaccaaaaattattgatgagcaactggtgtgtcgtttatcgaaaacggatattttcattatatgtcgagataataaaatttatctagataaaatgataacaagaaacttgaaactaaggttttatggccaccgtcagtatttggaatgtgaagtttttcgagttgaaggaattaaggataacctagacgacataaagaggataattaaagccagagagcacagaaataggcttctagcagacatcagagactataggccctatgcagacttggtttcagaaattcgtattcttttggtgggtccagttgggtctggaaagtccagttttttcaattcagtcaagtctatttttcatggccatgtgactggccaagccgtagtggggtctgataccaccagcataaccgagcggtataggatatattctgttaaagatggaaaaaatggaaaatctctgccatttatgttgtgtgacactatggggctagatggggcagaaggagcaggactgtgcatggatgacattccccacatcttaaaaggttgtatgccagacagatatcagtttaattcccgtaaaccaattacacctgagcattctacttttatcacctctccatctctgaaggacaggattcactgtgtggcttatgtcttagacatcaactctattgacaatctctactctaaaatgttggcaaaagtgaagcaagttcacaaagaagtattaaactgtggtatagcatatgtggccttgcttactaaagtggatgattgcagtgaggttcttcaagacaactttttaaacatgagtagatctatgacttctcaaagccgggtcatgaatgtccataaaatgctaggcattcctatttccaatattttgatggttggaaattatgcttcagatttggaactggaccccatgaaggatattctcatcctctctgcactgaggcagatgctgcgggctgcagatgattttttagaagatttgcctcttgaggaaactggtgcaattgagagagcgttacagccctgcatttgagataagttgccttgattctgacatttggcccagcctgtactggtgtgccgcaatgagagtcaatctctattgacagcctgcttcagattttgcttttgttcgttttgccttctgtccttggaacagtcatatctcaagttcaaaggccaaaacctgagaagcggtgggctaagataggtcctactgcaaaccacccctccatatttccgtaccatttacaattcagtttctgtgacatctttttaaaccactggaggaaaaatgagatattctctaatttattcttctataacactctatatagagctatgtgagtactaatcacattgaataatagttataaaattattgtatagacatctgcttcttaaacagattgtgagttctttgagaaacagcgtggattttacttatctgtgtattcacagagcttagcacagtgcctggtaatgagcaagcatacttgccattacttttccttcccactctctccaacatcacattcactttaaatttttctgtatatagaaaggaaaactagcctgggcaacatgatgaaaccccatctccactgc

SEQ ID NO: 64 - DNA, 6450 bp, Homo sapiens
cgcgctcgcggggggcggtggcgcccggcacagaggggttaagggggcggtgcagacgtctccccgcccatcccgcccctcgagagccgcggcgccccgccctatttatagcagcggtgcctagcgcgccgcgtctctccgcaggccccggccgcggcgtcctcgacaacctatcgaaggcgccatggagcgaccggcgcccctggccgtgcttcccttctcggaccccgcgcacgccctgagcctgctgcgcggcctgagccagctgcgcgccgagcgcaagttcctggacgtgaccctggaggcggcgggcgggcgcgacttcccggcgcaccgtgcggtgctggccgccgccagcccctacttccgcgccatgttcgcggggcagctgcgcgagagccgcgccgagcgggtgcgcctgcacggagtgcctcccgacatgctgcagctgctgctggacttcagctacacgggccgcgtggcggtaagcggcgacaacgctgagccgctgctgcgcgccgccgacctgctgcagttcccggccgtgaaggaggcgtgcggggccttcctgcagcagcagctcgacctggccaactgcctggacatgcaggacttcgctgaggccttcagctgctcgggactggcgagcgcggcgcagcggttcattctgcgccacgtgggcgagctgggcgccgagcagctggagcggctgccactggcgcgcctgctgcgctacctgcgggacgacgggctgtgtgtgcccaaggaggaggccgcctaccagctggcgctgcgctgggtccgcgctgacccgccgcgccgcgccgcgcactggccgcagctgctggaggccgtgcgcctgcccttcgtgcgccgcttctacctgttggcgcacgtcgaggccgagccgctggtggcgcgctgcccaccctgcctgcgcctgctgcgcgaggcgcgcgacttccaggcggcgcgctacgaccgccacgaccgcgggccctgtccccgaatgcgtcctcgcccgtccaccggtctcgccgagatcctcgtgctcgtgggcggctgcgaccaggactgtgacgagctggtcactgtcgactgctacaacccgcagacgggtcagtggcgctacctggccgagttcccagaccacctgggcggaggctacagcatcgtggcgctgggcaatgacatctacgtgacgggtgggtccgatggctcccggctctatgactgcgtgtggaggtacaactcaagcgtgaatgagtgggcggaggtggcgcccatgctgaaggcccgcgagtaccacagctcctctgtgctggacggactgctgtacgtggtggccgccgacagcaccgagcgctatgaccacaccactgactcctgggaggccctgcagcccatgacctaccccatggacaactgctccaccactgcgtgccgtggccggctctatgccatcggctccctggctggcaaggagaccatggtgatgcagtgctacgacccggacaccgacctgtggtcgctggtggactgcggccagctcccgccctggtccttcgcccccaagactgcgactctaaacggactcatgtactttgtcagggatgactccgctgaggtggacgtgtacaacccgacgaggaacgaatgggacaagatcccgtccatgaatcaggtaaattttcaggcgggccagcattggaagcacaggctggtcctgattttgcaacccaagtgtcatcgtgatgagtgtttgggatccacagccatgatggatgggtctcatctcaattaatagaaggctgctcttacccttattttgcacttaaggctcactgagacacagatgttaagtaataccctatgattacacagcttagtacacatttgagcagtgtttattgagtatctgctgtgagccagagagcagaaggaagtgagggagcaaggcatacagtcatctggggacacctgttccagagagggacagcaggtacagaggccctgcagcagggcaccctggcgtgttcttagatacaccagcagcccatgtggccggagcagagtcagcatgaggtctgtgacctaccttttttatttttgagacagggtcttgctctgtcacccaggctggagtgcagtggtacaatcatggctcactgcagcctccacctccttgactcgcagtcctcccaccgcaccttcctgaatagctgagactacaggcgtgtgccaccacacccagtaattttttttctcatatgtagatacaaaaggatattcttaaaatttttatagagacagggtcttgctgtgttacccaggctggtctcacactcctggcctcaagtgaccctcctgtctcagcctcccaaagtgctaggattataggcgtgaaccaccacgcccagctggttcctgaggaagtcagtgtgggaatactttttttttttttatacggagtctcgctctgtcacccaggctggagtgcagtggcacgatctcggctcactgcaagctccatctcccaggttcacgccattctcccgcctcaacctcccgagtagctgggactacaggtacccaccaccacgcccagctaattttgtttgtgtatttttagtagagacgggatttcactgtgttagccaggatggtctggatctcctgaccttgtgatctgcctggctcagcctcccaaagtgctgggattacaggcatgagccaccatgcccagcccactgtgggaatacttgtgttgagcacttgctgtgtgttctgaataggacaaccagggtccaccccttctctctgggcttgttgagaagaggggtgcccagcctgacagtgatgggacagggaggcttcagtgccatttggccatgtgagcagtgttagtctgaggtacacatcatattgcctacagccttctttcctgtgtgtctgttaacatttccaaacctacactccgtgacatccagcctcacagcttacatcacagcttaatgtcctggcatttaagagacccagcgttctgttttccccgcagtaagctgcacatagtcatagcgaatttgggaaagatggaaggaatcatccagcctcgcggttcagagcccagctctgccactgtcagccatgcaagcctcagttttcccatctgtaacatggggagaacagcactgctcagcccagagggccactgcagagattctgagagagaacgtaggaagcgctgctcggcacgacctgcacacggggaggcctggcgctgcagcgggcaccctcatcaccatagggaaggcccagctgcctccggggaggcccgttctcctaggcagggtgttggaaaggggttggcctctctgctgctttctgggagagccaaggccacccctctggggtactgacagggcatgccttgtctccagtggttccccaggtggggccctgccctaccctctcctctgacctccactcactcatccctttggcccacaggtacatgtggggggcagcctggccgtccttggggggaagctgtacgtctctgggggatacgacaatacatttgaactctcggacgtggtagaggcctatgacccagagactcgcgcgtggagcgtggtggggcggctcccagaacccaccttctggcatggcagtgtcagcatcttccgccagttcatgccccagaccttctcgggtgggcgtggcttcgagttggacagtggcagcgatgacatggacccaggccgaccccggccgccgcgggaccccgatgagctgcactagccccagtctggcccggcacgggcctcggtgcaggtaactggcacctctgcggggcagtgccccactcctttgtgcacaaggacacgttgggctcacaggaggagcacaggctcttgggtggcgaagccagcccaggatccattacctggaaggtttctgtaccttgagagcctgaatcagaggccgtcgggaacgccctccctgcagttgaggaagagccactttcctgccagcacatgtttctgggtcttggaggtcacccccaccccgcggatcacagctcacccacgcggcgcacacccctcctgccgttgtcatctgcacctacttgttcccaccttgggagaggacgatgacttgggagggacgcgtgaagggagaaggggtcctcccatgaggctgaggatggcctgaacctggagcagcggaccaggcagacgggctgaagtggggtcccaaattccatgtccagaggtgtggggagcctgcctccctagctcctggcccctgccaggggcttacatcaaaacacctcagagggctgccctccagaggctgcacccagaacagtgggacatgagcaggggtgtgggcttggagggtgaagaggatgtggtcctatcagatgctgggcctcctcagccatagccccctgctcctaccccctgactggctcttgcgtcctcacctctcaccctctccttcccgggaggccctgggaggtgatcattgacacccagccaagcagacagctgcgggtgcccaagcccttgctgggcctgcgcgtgaggagtcccactgcttctaaaggaagtcctgggcaggaggtggctttggtggttggttccaaagttgaaaatgcttgcagtttgaccttagaagaagtgggaagaagaaggagctctacagggtcagctttgtttgatttgtccagtctaagaagtcccattgccaaagctttctgcaggagggtgaatgccgcagcttggcagcccctgggtttctcttggaaatggtcagtttcccctcaaagtacccaaagtagccttggcttgagtttttgtccttgcctcctttttagagaagagggcatttagactgcattttcctggttaaagaaggttaaagcaaatgtttattgccttttctagtgaactaactcgtagagatgttctcagcaggaagacagtcttagcactgtcacttagcagattgcacttaagtcccttgtgctggccagatggcgtggctggttgccttaatatgtcccaggacccctgacagggctgcctggcctctccctcgtgctcctcaagagcccagtccatacactgtggatgtcattgctgtcgggttaggaagtcttgtcctagaacgccctggctggtatgaccacagttcatggcggctcttctcgcttgggtcatggtcatcttccagcacctgctgtgctgggaaggccgaggatgggggcccagcactgtccaggcctgctggggcctggctgggagtcctgtgggcagcatggaacatgcagctgggcttcctgtgaccaggcaccctctggcactgttgcttgccctgtgccctggaccttttcctgcccttctccttcctctgctcccttggggctaccccttggcccctcctggtctgtgcaaactccctcagggagcccccctgccctgtagctctcgcttaacttcctaggggctgctgagcccacccagaggttgttggagttcagcggggcagcttgtctcccttgtcagcaggggcgtaagggctgggtttggccatacaaggttggctacgccctcaatccctgaccgttccaggcactgagctgggcacccacggaaggacatgctgtccagactgtgatgactgccagcacagggcatctcgggcttggctggtctgcgaggccttgcccctgtggaactctgggttcctgttttctcagtcttttttgcggctttgctgtggttggcagctgccgtactccaggcttgtgtcggccactcagatgagggctgtggtgcgagccagtgcaggagagctgcgcttgggattgtgccctctcctgtgtctgtcctccggacctacccaggtctccaccatcaggaccctgtctttgggtttagaagaccaagtatggggaaaaccaggcaccagcctctgcagcaatgggtccctctagcctgtggacaccagctgggggatccagggtcaggccccctcctctccccagtttccctctgctgtgggttctgggctgtcatgtctccaccacttaaggatgtctttacactgacttcaggatagatgttgggatgcctgggcatggccacatgttacatgtacagaactttgtctacagcacaaattaagttatataaacacagtgactggtatttaatgctgatctactataaggtattctatatttatatgacttcagagacgcgtatgtaataaaggacgccctccctccagtgtccacatccagttcaccccagagggtcgggcaggttgacatatttatttttgtctattctgtaggcttccatgtccagaatcctgcttaaggttttagggtaccttcagtactttttgcaataaaagtatttcctatccatttgg

SEQ ID NO: 65 - DNA, 1887 bp, Homo sapiens
ggggtatcgataagtttctttttttttttttttttgagacagaatctcgctctgtcgcccaggctggaatgcagtggcgcgatctctgctcactacaagctccgcctcccgggttcacgccattctcccgcctcggcctcccaaagtgctgggattacaggcgtgagccaccgcgcccggccttaaaaattgaatctgtagcttaggccatccaaattttataaatccaaattaactttagaatgtttctattactttcacttttacatatataaattttaagtgtcctgattggctgaacaatatctcacatcaaatgctttgcctggaaatagatatcccactggggatagtggtgtgtaaactatgacttggacaattctatatactcaagcaccataaaaagtatgcagttgaaaagaaaatcaaagttgactcctgggtgccaactaaatattcaaatcaggtactcatccttatcagctaaattcattttcaccaggaacagaccaccaaataaattattttatcctaataactagttttgaagcagtgtaattactctggaagaaggctctaaaaagtcatgattcccccactattttgaaatgtatcctctaacaaggatcattatagtgtaatcttaatttttatgtttatcaagatgaaatcttgtttgaattgtgatattataaaaggggactcaaaaatccaagcagtctactgtgtttaaattaacaccacaaccttccttatcagattataagagtagaaaaattaacacttggtgtgtgaatcttcaggaaaatgagctatttcataagctcaaacaagcagcttccttttccagagaatatagaattatattatggtctccttaaatgtttagtagctcttatggtcacagcatttttaatctccctatggcatctttatggaataattttctaaagggtaattctctactaaaaatatcagaccccgaccatatttaatgtggagagcaataccctcttagaaagaaaatacattgactcatacacttgttaaaagttaataaagaaatagctcatttttaaagccggaagtttatggtctctgcatcgtcaatttaatttaagcattgctgagacaatctttaatctactcccctttttgtaataccttatttatggtgcattttcatttttatttgggggaaacgttagcccaacagagccggcagatgaaagtgttgaaaagaggtcaaatggaaacaaaggctcttacccgctgtatttcagacaggactgaggcacttagccgaggagccactgggttattagattaatttcaaaagagcttttacaagttgcttaattcctttttttttttttttttcaaaaacccatgaaccacaaactcaaatttctcctcaaatggggttaatctgacaaatgaggcatggacccagccttgtggaaaaagcattccacgctaatgagatcttggtctttcttgtgaggctacgttatttatgtaaatatgtctggaggcaccttctctaagcttttagttttctatgatctattagtttagtgtttattaaagaatcaaatgtatagaattaccaggcattcgtggggaatgctgtgtagcaaatgtaaaactgacctgctcggaagaaacgtaggaacgcttcaaacccactgtaatgtttggtttgagattattttcattgctttgagagtgaactgcctaagagtaggccttataataaatgctatgtgcgtcttcagtagttccaagctaaagcaatttggcattctcccactgtgatttgtgacttttaaacccacaaaataaaagctttttggtattgataaaaagaaaaaaaaaaaaaaaaaa

SEQ ID NO: 66 - DNA, 2155 bp, Homo sapiens
tgggggcgttcgcctcgtttgcctcgcgccctccactggagctgttcgcgcctcccggctcccaccgcagcccacccggcagaggagtcgctaccagcgcccagtgcgctctgtcagtccgcaaactccttgccgcccgccccgggctgggcgccaaataccaggctaccatggtctacaagactctcttcgctctttgcatcttaactgcaggatggagggtacagagtctgcctacatcagctcctttgtctgtttctcttccgacaaacattgtaccaccgactaccatctggactagctctccacaaaacactgatgcagacactgcctccccatccaacggcactcacaacaactcggtgctcccagttacagcatcagccccaacatctctgcttcctaagaacatttccatagagtccagagaagaggagatcaccagcccaggttcgaattgggaaggcacaaacacagacccctcaccttctgggttctcgtcaacaagcggtggagtccacttaacaaccacgttggaggaacacagcttgggcactcctgaagcaggcgtggcagctacactgtcgcagtccgctgctgagcctcccacactcatctcccctcaagctccagcctcatcaccctcatccctatcaacctcaccacctgaggtcttttctgcctccgttactaccaaccatagctccactgtgaccagcacccaacccactggagctccaactgcaccagagtccccaacagaggagtccagctctgaccacacacccacttcacatgccacagctgagccagtgccccaggagaaaacacccccaacaactgtgtcaggcaaagtgatgtgtgagctcatagacatggagacaccaccacctttcccagggtgatcatgcaggaagtagaacatgcattaagttcaggcagcatcgccgccattaccgtgacagtcattgccgtggtgctgctggtgtttggagttgcagcctacctaaaaatcaggcattcctcctatggaagacttttggacgaccatgactacgggtcctggggaaactacaacaaccctctgtacgatgactcctaacaatggaatatggcctgggatgaggattaactgttctttatttataagtgcttatccagtagaattaataagtacctgatgcgcattgaacgacaatcttaagccctgttttgttggtatggttgtttttgttttcctccctctcctctggctgctacaacttcccctttctggtacaagaagaaccattctttaaaggtgagtggaggctgatttgcagctgaagtgggccagccttgcaccagccaggccagaccaccatggtgaaggcttctttccccactgcaggacccactttgagaaggaccgaggaggaggatttgggttgttttgttaggggttactttcaggggaacatttcatttgtgttatttcttaaacttctatttaggaaattacattaagtattaatgaggggaaaggaaatgagctctacgaggatttcaccctgcatgggagagagcagggttttctcagattcctttttaatctctatttatctggttgtttctgacaggatgctgcctgcttggctctacaagctggaaagcagcttcttagctgcctaattaatgaaagatgaaaataggaagtgccctggagggggccagcaggtcacggggcagaatctctcaggttgctgtgggatctcagtgtgcccctacctgttctcccctccaggccacctgtctctgtaaaggatgtctgctctgttcaaaaggcagctgggatcccagcccacaagtgatcagcagagttgcatttccaaagaaaaaggctatgagatgagctgagttatagagagaaagggagaggcatgtacggtgtggggaagtggaagggaagctggcgggggagaaggaggctaacctgcactgagtacttcattaggacaagtgagaatcagctattgataatggccagagatatccacagcttggaggagcccagagaccgtttgctttatacccacacagcaactggtccactgctttactgtctgttggataatggctgtaaaatgtttaaaaacaaaaaaaaaaaaaaaaaaaa

SEQ ID NO: 67 - DNA, 634 bp, Homo sapiens
cggctgagaggcagcgaactcatctttgccagtacaggagcttgtgccgtggcccacagcccacagcccacagccatgggctgggacctgacggtgaagatgctggcgggcaacgaattccaggtgtccctgagcagctccatgtcggtgtcagagctgaaggcgcagatcacccagaagattggcgtgcacgccttccagcagcgtctggctgtccacccgagcggtgtggcgctgcaggacagggtcccccttgccagccagggcctgggccctggcagcacggtcctgctggtggtggacaaatgcgacgaacctctgagcatcctggtgaggaataacaagggccgcagcagcacctacgaggtccggctgacgcagaccgtggcccacctgaagcagcaagtgagcgggctggagggtgtgcaggacgacctgttctggctgaccttcgaggggaagcccctggaggaccagctcccgctgggggagtacggcctcaagcccctgagcaccgtgttcatgaatctgcgcctgcggggaggcggcacagagcctggcgggcggagctaagggcctccaccagcatccgagcaggatcaagggccggaaataaaggctgttgtaagagaat

SEQ ID NO: 68 - DNA, 1642 bp, Homo sapiens
ccagatctcagaggagcctggctaagcaaaaccctgcagaacggctgcctaatttacagcaaccatgagtacaaatggtgatgatcatcaggtcaaggatagtctggagcaattgagatgtcactttacatgggagttatccattgatgacgatgaaatgcctgatttagaaaacagagtcttggatcagattgaattcctagacaccaaatacagtgtgggaatacacaacctactagcctatgtgaaacacctgaaaggccagaatgaggaagccctgaagagcttaaaagaagctgaaaacttaatgcaggaagaacatgacaaccaagcaaatgtgaggagtctggtgacctggggcaactttgcctggatgtattaccacatgggcagactggcagaagcccagacttacctggacaaggtggagaacatttgcaagaagctttcaaatcccttccgctatagaatggagtgtccagaaatagactgtgaggaaggatgggccttgctgaagtgtggaggaaagaattatgaacgggccaaggcctgctttgaaaaggtgcttgaagtggaccctgaaaaccctgaatccagcgctgggtatgcgatctctgcctatcgcctggatggctttaaattagccacaaaaaatcacaagccattttctttgcttcccctaaggcaggctgtccgcttaaatccagacaatggatatattaaggttctccttgccctgaagcttcaggatgaaggacaggaagctgaaggagaaaagtacattgaagaagctctagccaacatgtcctcacagacctatgtctttcgatatgcagccaagttttaccgaagaaaaggctctgtggataaagctcttgagttattaaaaaaggccttgcaggaaacacccacttctgtcttactgcatcaccagatagggctttgctacaaggcacaaatgatccaaatcaaggaggctacaaaagggcagcctagagggcagaacagagaaaagctagacaaaatgataagatcagccatatttcattttgaatctgcagtggaaaaaaagcccacatttgaggtggctcatctagacctggcaagaatgtatatagaagcaggcaatcacagaaaagctgaagagaattttcaaaaattgttatgcatgaaaccagtggtagaagaaacaatgcaagacatacatttctactatggtcggtttcaggaatttcaaaagaaatctgacgtcaatgcaattatccattatttaaaagctataaaaatagaacaggcatcattaacaagggataaaagtatcaattctttgaagaaattggttttaaggaaacttcggagaaaggcattagatctggaaagcttgagcctccttgggttcgtctataaattggaaggaaatatgaatgaagccctggagtactatgagcgggccctgagactggctgctgactttgagaactctgtgagacaaggtccttaggcacccagatatcagccactttcacatttcatttcattttatgctaacatttactaatcatcttttctgcttactgttttcagaaacattataattcactgtaatgatgtaattcttgaataataaatctgacaaaatatt

SEQ ID NO: 69 - DNA, 983 bp, Homo sapiens
ggcacgaggcctgacatggagcctgccagctccgtcagccctgactcggcccggagctgagctccccacctgccggtagcccaggagatggagcagcccagcccacgtgcccggccttccgcccctgacttcacttgataacaaactagaaactgaaacagggtcgggatgccgatgccggcttggagttagagatgagtcaccgctgagagcagctgcagtagctgagcagtggcagcagagaggcagacgtgagctgagggcgcagaggcaggcagcatctctgagggtccccaaggagcatggctgggagccgtgaggtggtggccatggactgcgagatggtggggctggggccccaccgggagagtggcctggctcgttgcagcctcgtgaacgtccacggtgctgtgctgtacgacaagttcatccggcctgagggagagatcaccgattacagaacccgggtcagcggggtcacccctcagcacatggtgggggccacaccatttgccgtggccaggctagagatcctgcagctcctgaaaggcaagctggtggtgggtcatgacctgaagcacgacttccaggcactgaaagaggacatgagcggctacacaatctacgacacgtccactgacaggctgttgtggcgtgaggccaagctggaccactgcaggcgtgtctccctgcgggtgctgagtgagcgcctcctgcacaagagcatccagaacagcctgcttggacacagctcggtggaagatgcgagggcaacgatggagctctatcaaatctcccagagaatccgagcccgccgagggctgccccgcctggctgtgtcagactgaagccccatccagcccgttccgcagggactagaggctttcggctttttgggacagcaactaccttgcttttggaaaatacatttttaatagtaaagtggctctatattttctctacgcaaaaaaaaaaaaaaaaaa

SEQ ID NO: 70 - DNA, 1086 bp, Homo sapiens
atgtgggtgcttacacctgctgcttttgctgggaagctcttgagtgtgttcaggcaacctctgagctctctgtggaggagcctggtcccgctgttctgctggctgagggcaaccttctggctgctagctaccaagaggagaaagcagcagctggtcctgagagggccagatgagaccaaagaggaggaagaggaccctcctctgcccaccaccccaaccagcgtcaactatcacttcactcgccagtgcaactacaaatgcggcttctgtttccacacagccaaaacatcctttgtgctgccccttgaggaagcaaagagaggattgcttttgcttaaggaagctggtatggagaagatcaacttttcaggtggagagccatttcttcaagaccggggagaatacctgggcaagttggtgaggttctgcaaagtagagttgcggctgcccagcgtgagcatcgtgagcaatggaagcctgatccgggagaggtggttccagaattatggtgagtatttggacattctcgctatctcctgtgacagctttgacgaggaagtcaatgtccttattggccgtggccaaggaaagaagaaccatgtggaaaaccttcaaaagctgaggaggtggtgtagggattatagagtcgctttcaagataaattctgtcattaatcgtttcaacgtggaagaggacatgacggaacagatcaaagcactaaaccctgtccgctggaaagtgttccagtgcctcttaattgagggtgagaattgtggagaagatgctctaagagaagcagaaagatttgttattggtgatgaagaatttgaaagattcttggagcgccacaaagaagtgtcctgcttggtgcctgaatctaaccagaagatgaaagactcctaccttattctggatgaatatatgcgctttctgaactgtagaaagggacggaaggacccttccaagtccatcctggatgttggtgtagaagaagctataaaattcagtggatttgatgaaaagatgtttctgaagcgaggaggaaaatacatatggagtaaggctgatctgaagctggattggtag

SEQ ID NO: 71 - DNA, 1919 bp, Homo sapiens
ctgaagaacaaatcagcctggtcaccagcttttcggaacagcagagacacagagggcagtcatgagtgaggtcaccaagaattccctggagaaaatccttccacagctgaaatgccatttcacctggaacttattcaaggaagacagtgtctcaagggatctagaagatagagtgtgtaaccagattgaatttttaaacactgagttcaaagctacaatgtacaacttgttggcctacataaaacacctagatggtaacaacgaggcagccctggaatgcttacggcaagctgaagagttaatccagcaagaacatgctgaccaagcagaaatcagaagtctagtcacttggggaaactacgcctgggtctactatcacttgggcagactctcagatgctcagatttatgtagataaggtgaaacaaacctgcaagaaattttcaaatccatacagtattgagtattctgaacttgactgtgaggaagggtggacacaactgaagtgtggaagaaatgaaagggcgaaggtgtgttttgagaaggctctggaagaaaagcccaacaacccagaattctcctctggactggcaattgcgatgtaccatctggataatcacccagagaaacagttctctactgatgttttgaagcaggccattgagctgagtcctgataaccaatacgtcaaggttctcttgggcctgaaactgcagaagatgaataaagaagctgaaggagagcagtttgttgaagaagccttggaaaagtctccttgccaaacagatgtcctccgcagtgcagccaaattttacagaagaaaaggtgacctagacaaagctattgaactgtttcaacgggtgttggaatccacaccaaacaatggctacctctatcaccagattgggtgctgctacaaggcaaaagtaagacaaatgcagaatacaggagaatctgaagctagtggaaataaagagatgattgaagcactaaagcaatatgctatggactattcgaataaagctcttgagaagggactgaatcctctgaatgcatactccgatctcgctgagttcctggagacggaatgttatcagacaccattcaataaggaagtccctgatgctgaaaagcaacaacaatcccatcagcgctactgcaaccttcagaaatataatgggaagtctgaagacactgctgtgcaacatggtttagagggtttgtccataagcaaaaaatcaactgacaaggaagagatcaaagaccaaccacagaatgtatctgaaaatctgcttccacaaaatgcaccaaattattggtatcttcaaggattaattcataagcagaatggagatctgctgcaagccaaatgttatgagaaggaactgggccgcctgctaagggatgccccttcaggcataggcagtattttcctgtcagcatctgagcttgaggatggtagtgaggaaatgggccagggcgcagtcagctccagtcccagagagctcctctctaactcagagcaactgaactgagacagaggaggaaaacagagcatcagaagcctgcagtggtggttgtgacgggtaggaggataggaagacagggggcccaacctgggattgctgagcagggaagctttgcatgttgctctaaggtacatttttaaagagttgttttttggccgggcgcagtgctcatgcctgtaatcccagaactttgggaggccgaggtgggcggatcacgaggtctggagtttgagaccatcctggctaacacagtgaaatcccgtctctactaaaaatacaaaaaattagccaggcgtggtggctggcacctgtagtcccagctacttgggaggctgaggcaggagaatggcgtgaacctggaaggaagaggttgcagagagccaagattgcg

SEQ ID NO: 72 - DNA, 1357 bp, Homo sapiens
atctcaacaacgagttaccaatacttgctcttgattgataaacagaatggggttttggatcttagcaattctcacaattctcatgtattccacagcagcaaagtttagtaaacaatcatggggcctggaaaatgaggctttaattgtaagatgtcctagacaaggaaaacctagttacaccgtggattggtattactcacaaacaaacaaaagtattcccactcaggaaagaaatcgtgtgtttgcctcaggccaacttctgaagtttctaccagctgaagttgctgattctggtatttatacctgtattgtcagaagtcccacattcaataggactggatatgcgaatgtcaccatatataaaaaacaatcagattgcaatgttccagattatttgatgtattcaacagtatctggatcagaaaaaaattccaaaatttattgtcctaccattgacctctacaactggacagcacctcttgagtggtttaagaattgtcaggctcttcaaggatcaaggtacagggcgcacaagtcatttttggtcattgataatgtgatgactgaggacgcaggtgattacacctgtaaatttatacacaatgaaaatggagccaattatagtgtgacggcgaccaggtccttcacggtcaaggatgagcaaggcttttctctgtttccagtaatcggagcccctgcacaaaatgaaataaaggaagtggaaattggaaaaaacgcaaacctaacttgctctgcttgttttggaaaaggcactcagttcttggctgccgtcctgtggcagcttaatggaacaaaaattacagactttggtgaaccaagaattcaacaagaggaagggcaaaatcaaagtttcagcaatgggctggcttgtctagacatggttttaagaatagctgacgtgaaggaagaggatttattgctgcagtacgactgtctggccctgaatttgcatggcttgagaaggcacaccgtaagactaagtaggaaaaatccaagtaaggagtgtttctgagactttgatcacctgaactttctctagcaagtgtaagcagaatggagtgtggttccaagagatccatcaagacaatgggaatggcctgtgccataaaatgtgcttctcttcttcgggatgttgtttgctgtctgatctttgtagactgttcctgtttgctgggagcttctctgctgcttaaattgttcgtcctcccccactccctcctatcgttggtttgtctagaacactcagctgcttctttggtcatccttgttttctaactttatgaactccctctgtgtcactgtatgtgaaaggaaatgcaccaacaaccgaaaactg

SEQ ID NO: 73 - DNA, 1671 bp, Homo sapiens
atggggttttggatcttagcaattctcacaattctcatgtattccacagcagcaaagtttagtaaacaatcatggggcctggaaaatgaggctttaattgtaagatgtcctagacaaggaaaacctagttacaccgtggattggtattactcacaaacaaacaaaagtattcccactcaggaaagaaatcgtgtgtttgcctcaggccaacttctgaagtttctaccagctgaagttgctgattctggtatttatacctgtattgtcagaagtcccacattcaataggactggatatgcgaatgtcaccatatataaaaaacaatcagattgcaatgttccagattatttgatgtattcaacagtatctggatcagaaaaaaattccaaaatttattgtcctaccattgacctctacaactggacagcacctcttgagtggtttaagaattgtcaggctcttcaaggatcaaggtacagggcgcacaagtcatttttggtcattgataatgtgatgactgaggacgcaggtgattacacctgtaaatttatacacaatgaaaatggagccaattatagtgtgacggcgaccaggtccttcacggtcaaggatgagcaaggcttttctctgtttccagtaatcggagcccctgcacaaaatgaaataaaggaagtggaaattggaaaaaacgcaaacctaacttgctctgcttgttttggaaaaggcactcagttcttggctgccgtcctgtggcagcttaatggaacaaaaattacagactttggtgaaccaagaattcaacaagaggaagggcaaaatcaaagtttcagcaatgggctggcttgtctagacatggttttaagaatagctgacgtgaaggaagaggatttattgctgcagtacgactgtctggccctgaatttgcatggcttgagaaggcacaccgtaagactaagtaggaaaaatccaattgatcatcatagcatctactgcataattgcagtatgtagtgtatttttaatgctaatcaatgtcctggttatcatcctaaaaatgttctggattgaggccactctgctctggagagacatagctaaaccttacaagactaggaatgatggaaagctctatgatgcttatgttgtctacccacggaactacaaatccagtacagatggggccagtcgtgtagagcactttgttcaccagattctgcctgatgttcttgaaaataaatgtggctataccttatgcatttatgggagagatatgctacctggagaagatgtagtcactgcagtggaaaccaacatacgaaagagcaggcggcacattttcatcctgacccctcagatcactcacaataaggagtttgcctacgagcaggaggttgccctgcactgtgccctcatccagaacgacgccaaggtgatacttattgagatggaggctctgagcgagctggacatgctgcaggctgaggcgcttcaggactccctccagcatcttatgaaagtacaggggaccatcaagtggagggaggaccacattgccaataaaaggtccctgaattccaaattctggaagcacgtgaggtaccaaatgcctgtgccaagcaaaattcccagaaaggcctctagtttgactcccttggctgcccagaagcaatag

SEQ ID NO: 74 - DNA, 597 bp, Homo sapiens
agctgaagttgaggatctcttactctctaagccacggaattaacccgagcaggcatggaggcctctgctctcacctcatcagcagtgaccagtgtggccaaagtggtcagggtggcctctggctctgccgtagttttgcccctggccaggattgctacagttgtgattggaggagttgtggccatggcggctgtgcccatggtgctcagtgccatgggcttcactgcggcgggaatcgcctcgtcctccatagcagccaagatgatgtccgcggcggccattgccaatgggggtggagttgcctcgggcagccttgtgggtactctgcagtcactgggagcaactggactctccggattgaccaagttcatcctgggctccattgggtctgccattgcggctgtcattgcgaggttctactagctccctgcccctcgccctgcagagaagagaaccatgccaggggagaaggcacccagccatcctgacccagcgaggagccaactatcccaaatatacctgggtgaaatataccaaattctgcatctccagaggaaaataagaaataaagatgaattgttgcaactcttaaaaaaa

SEQ ID NO: 75 - DNA, 1098 bp, Homo sapiens
atgtcagccccactggatgccgccctccacgcccttcaggaggagcaggccagaccgccctccacgcccttcaggaggagcaggccagactcaagatgaggctgtgggacctgcagcagctgagaaaggagctcggggactcccccaaagacaaggtcccattttcagtgcccaagatccccctggtattccgaggacacacccagcaggacccggaagtgcctaagtctttagtttccaatttgcggatccactgccctctgcttgcgggctctgctctgatcacctttgatgaccccaaagtggctgagcaggtgctgcaacaaaaggagcacacgatcaacatggaggagtgccggctgcgggtgcaggtccagcccttggagctgcccatggtcaccaccatccaggtgatggtgtccagccagttgagtggccggagggtgttggtcactggatttcctgccagcctcaggctgagtgaggaggagctgctggacaagctagagatcttctttggcaagactaggaacggaggtggcgatgtggacgttcgggagctactgccagggagtgtcatgctggggtttgctagggatggagtggctcagcgtctgtgccaaatcggccagttcacagtgccactgggtgggcagcaagtccctctgagagtctctccgtatgtgaatggggagatccagaaggctgagatcaggtcgcagccagttccccgctcggtactggtgctcaacattcctgatatcttggatggcccggagctgcatgacgtcctggagatccacttccagaagcccacccgcgggggcggggaggtagaggccctgacagtcgtaccccaaggacagcagggcctagcagtcttcacctctgagtcaggctaggggcctccccttctcatcctccccacccccccgccaaggttctcacactggcctgggcttgggtgcccatataggaggtctgtatgttcaccaacagtgcggaggggtcacacattgcaaaacactgcccagaacagtaaaaagagcctgcatgccaaaaaaaaaaaaaaaaaaaaaaaaaaaaaaaaaaaaaaaa

SEQ ID NO: 76 - DNA, 647 bp, Homo sapiens
gctcactgagcaccgtcccagcatccggacaccacagcggcccttcgctccacgcagaaaaccacacttctcataccttcactcaacacttccttccccaaagccagaagatgcacaaggaggaacatgaggtggctgtgctgggggcaccccccagcaccatccttccaaggtccaccgtgattaacatccacagcgagacctccgtgcccgaccatgtcgtctggtccctgttcaacaccctcttcttgaactggtgctgtctgggcttcatagcattcgcctactccgtaaagtctagggacaggaagatggttggcgacgtgaccggggcccaggcctatgcctccaccgccaagtgcctgaacatctgggccctgattctgggcatcctcatgaccattggattcatcctgttactggtattcggctctgtaacagtctaccatattatgttacagataatacaggaaaaacggggttactagtagccgcccatagcctgcaacctttgcactccactgtgcaatgctggccctgcacgctggggctgttgcccctgcccccttggtcctgcccctagatacagcagtttatacccacacacctgtctacagtgtcattcaataaagtgcacgtgcttgtga

SEQ ID NO: 77 - DNA, 817 bp, Homo sapiens
gaaccgtttactcgctgctgtgcccatctatcagcaggctccgggctgaagattgcttctcttctctcctccaaggtctagtgacggagcccgcgcgcggcgccaccatgcggcagaaggcggtatcgcttttcttgtgctacctgctgctcttcacttgcagtggggtggaggcaggtaagaaaaagtgctcggagagctcggacagcggctccgggttctggaaggccctgaccttcatggccgtcggaggaggactcgcagtcgccgggctgcccgcgctgggcttcaccggcgccggcatcgcggccaactcggtggctgcctcgctgatgagctggtctgcgatcctgaatgggggcggcgtgcccgccggggggctagtggccacgctgcagagcctcggggctggtggcagcagcgtcgtcataggtaatattggtgccctgatgggctacgccacccacaagtatctcgatagtgaggaggatgaggagtagccagcagctcccagaacctcttcttccttcttggcctaactcttccagttaggatctagaactttgcctttttttttttttttttttttttttgagatgggttctcactatattgtccaggctagagtgcagtggctattcacagatgcgaacatagtacactgcagcctccaactcctagcctcaagtgatcctcctgtctcaacctcccaagtaggattacaagcatgcgccgacgatgcccagaatccagaactttgtctatcactctccccaacaacctagatgtgaaaacagaataaacttcacccagaaaa

SEQ ID NO: 78 - DNA, 829 bp, Homo sapiens
gaaccgtttactcgctgctgtgcccatctatcagcaggctccgggctgaagattgcttctcttctctcctccaaggtctagtgacggagcccgcgcgcggcgccaccatgcggcagaaggcggtatcgcttttcttgtgctacctgctgctcttcacttgcagtggggtggaggcaggtgagaatgcgggtaagaaaaagtgctcggagagctcggacagcggctccgggttctggaaggccctgaccttcatggccgtcggaggaggactcgcagtcgccgggctgcccgcgctgggcttcaccggcgccggcatcgcggccaactcggtggctgcctcgctgatgagctggtctgcgatcctgaatgggggcggcgtgcccgccggggggctagtggccacgctgcagagcctcggggctggtggcagcagcgtcgtcataggtaatattggtgccctgatgggctacgccacccacaagtatctcgatagtgaggaggatgaggagtagccagcagctcccagaacctcttcttccttcttggcctaactcttccagttaggatctagaactttgcctttttttttttttttttttttttttgagatgggttctcactatattgtccaggctagagtgcagtggctattcacagatgcgaacatagtacactgcagcctccaactcctagcctcaagtgatcctcctgtctcaacctcccaagtaggattacaagcatgcgccgacgatgcccagaatccagaactttgtctatcactctccccaacaacctagatgtgaaaacagaataaacttcacccagaaaa

SEQ ID NO: 79 - DNA, 841 bp, Homo sapiens
gaaccgtttactcgctgctgtgcccatctatcagcaggctccgggctgaagattgcttctcttctctcctccaaggtctagtgacggagcccgcgcgcggcgccaccatgcggcagaaggcggtatcgcttttcttgtgctacctgctgctcttcacttgcagtggggtggaggcaggtgagaatgcgggtaaggatgcaggtaagaaaaagtgctcggagagctcggacagcggctccgggttctggaaggccctgaccttcatggccgtcggaggaggactcgcagtcgccgggctgcccgcgctgggcttcaccggcgccggcatcgcggccaactcggtggctgcctcgctgatgagctggtctgcgatcctgaatgggggcggcgtgcccgccggggggctagtggccacgctgcagagcctcggggctggtggcagcagcgtcgtcataggtaatattggtgccctgatgggctacgccacccacaagtatctcgatagtgaggaggatgaggagtagccagcagctcccagaacctcttcttccttcttggcctaactcttccagttaggatctagaactttgcctttttttttttttttttttttttttgagatgggttctcactatattgtccaggctagagtgcagtggctattcacagatgcgaacatagtacactgcagcctccaactcctagcctcaagtgatcctcctgtctcaacctcccaagtaggattacaagcatgcgccgacgatgcccagaatccagaactttgtctatcactctccccaacaacctagatgtgaaaacagaataaacttcacccagaaaa

SEQ ID NO: 80 - DNA, 1714 bp, Homo sapiens
ggggcattttgtgcctgcctagctatccagacagagcagctaccctcagctctagctgatactacagacagtacaacagatcaagaagtatggcagtgacaactcgtttgacacggttgcacgaaaagatcctgcaaaatcattttggagggaagcggcttagccttctctataagggtagtgtccatggattccgtaatggagttttgcttgacagatgttgtaatcaagggcctactctaacagtgatttatagtgaagatcatattattggagcatatgcggaagagagttaccaggaaggaaagtatgcttccatcatcctttttgcacttcaagatactaaaatttcagaatggaaactaggactatgtacaccagaaacactgttttgttgtgatgttacaaaatataactccccaactaatttccagatagatggaagaaatagaaaagtgattatggacttaaagacaatggaaaatcttggacttgctcaaaattgtactatctctattcaggattatgaagtttttcgatgcgaagattcactggatgaaagaaagataaaaggggtcattgagctcaggaagagcttactgtctgccttgagaacttatgaaccatatggatccctggttcaacaaatacgaattctgctgctgggtccaattggagctgggaagtccagctttttcaactcagtgaggtctgttttccaagggcatgtaacgcatcaggctttggtgggcactaatacaactgggatatctgagaagtataggacatactctattagagacgggaaagatggcaaatacctgccgtttattctgtgtgactcactggggctgagtgagaaagaaggcggcctgtgcagggatgacatattctatatcttgaacggtaacattcgtgatagataccagtttaatcccatggaatcaatcaaattaaatcatcatgactacattgattccccatcgctgaaggacagaattcattgtgtggcatttgtatttgatgccagctctattcaatacttctcctctcagatgatagtaaagatcaaaagaattcgaagggagttggtaaacgctggtgtggtacatgtggctttgctcactcatgtggatagcatggatttgattacaaaaggtgaccttatagaaatagagagatgtgagcctgtgaggtccaagctagaggaagtccaaagaaaacttggatttgctctttctgacatctcggtggttagcaattattcctctgagtgggagctggaccctgtaaaggatgttctaattctttctgctctgagacgaatgctatgggctgcagatgacttcttagaggatttgccttttgagcaaatagggaatctaagggaggaaattatcaactgtgcacaaggaaaaaaatagatatgtgaaaggttcacgtaaatttcctcacatcacagaagattaaaattcagaaaggagaaaacacagaccaaagagaagtatctaagaccaaagggatgtgttttattaatgtctaggatgaagaaatgcatagaacattgtagtacttgtaaataactagaaataacatgatttagtcataattgtgaaaaatagtaataatttttcttggatttatgttctgtatctgtgaaaaaataaatttcttataaaactcggaaaaaaaaaaaaaaaaaaaaaaaaaaaaa

SEQ ID NO: 81 - DNA, 1032 bp, Homo sapiens
ggagggtgggcagcactcgctttattgtccagcattccacatggatagtcgccacacctttgcccctgctgcgatgaccctgtcgccacttctgctgttcctgccaccgctgctgctgctgctggacgtccccacggcggcggtgcaggcgtcccctctgcaagcgttagacttctttgggaatgggccaccagttaactacaagacaggcaatctatacctgcgggggcccctgaagaagtccaatgcaccgcttgtcaatgtgaccctctactatgaagcactgtgcggtggctgccgagccttcctgatccgggagctcttcccaacatggctgttggtcatggagatcctcaatgtcacgtcggtgccctacggaaacgcacaggaacaaaatgtcagtggcaggtgggagttcaagtgccagcttggagaagaggagtgcaaattcaacaaggtggaggcctgcgtgttggatgaacttgacatggagctagccttcctgaccatgtctggcatggcatggaagagtttgaggacatggagagaagtctgccactatgcctgcagctctacgccccagggctgtcgccagaactatcatggagtgtgcaatgggggaccgcggcatgcagctcatgcacgccaacgcccagcggacagatgctctccagccaccgcacgagtatgtgccctgggtcaccgtcaatgggaaacccttggaagatcagacccagctccttacccttgtctgccagttgtaccagggcaagaagccggatgtctgcccttcctcaaccagctccctccggagtgtttgcttcgagtgttggccggtgggctgcggagagctcatggaaggcgagtgggaactcggctgcctgcctttttttctgatccagaccctcggcacctgctacttaccaactggaaaattttatgcatcccatgaagcccagatacacaaaattccacccctagatcaagaatcctgctccactaagaatggtgctaaagtaaaactagtttaat

SEQ ID NO: 82 - DNA, 2019 bp, Homo sapiens
gaccttggcttgcccggggccatttcataattctgaatcatgtctgataacggagaactggaagataagcctccagcacctcctgtgcgaatgagcagcaccatctttagcactggaggcaaagaccctttgtcagccaatcacagtttgaaacctttgccctctgttccagaagagaaaaagcccaggcataaaatcatctccatattctcaggcacagagaaaggaagtaaaaagaaagaaaaggaacggccagaaatttctcctccatctgattttgagcacaccatccatgttggctttgatgctgttactggagaattcactggcatgccagaacagtgggctcgattactacagacctccaatatcaccaaactagagcaaaagaagaatcctcaggctgtgctggatgtcctaaagttctacgactccaacacagtgaagcagaaatatctgagctttactcctcctgagaaagatggccttccttctggaacgccagcactgaatgccaagggaacagaagcacccgcagtagtgacagaggaggaggatgatgatgaagagactgctcctcccgttattgccccgcgaccggatcatacgaaatcaatttacacacggtctgtaattgaccctgttcctgcaccagttggtgattcacatgttgatggtgctgccaagtctttagacaaacagaaaaagaagcctaagatgacagatgaagagattatggagaaattaagaactatcgtgagcataggtgaccctaagaaaaaatatacaagatatgaaaaaattggacaaggggcttctggtacagttttcactgctactgacgttgcactgggacaggaggttgctatcaaacaaattaatttacagaaacagccaaagaaggaactgatcattaacgagattctggtgatgaaagaattgaaaaatcccaacatcgttaactttttggacagttacctggtaggagatgaattgtttgtggtcatggaataccttgctggggggtcactcactgatgtggtaacagaaacagcttgcatggatgaagcacagattgctgctgtatgcagagagtgtttacaggcattggagtttttacatgctaatcaagtgatccacagagacatcaaaagtgacaatgtacttttgggaatggaaggatctgttaagctcactgactttggtttctgtgcccagatcacccctgagcagagcaaacgcagtaccatggtcggaacgccatactggatggcaccagaggtggttacacggaaagcttatggccctaaagtcgacatatggtctctgggtatcatggctattgagatggtagaaggagagcctccatacctcaatgaaaatcccttgagggccttgtacctaatagcaactaatggaaccccagaacttcagaatccagagaaactttccccaatatttcgggatttcttaaatcgatgtttggaaatggatgtggaaaaaaggggttcagccaaagaattattacagcatcctttcctgaaactggccaaaccgttatctagcttgacaccactgatcatggcagctaaagaagcaatgaagagtaaccgttaacatcactgctgtgggctcatactcttttttccattttctacaagaagccttttagtatatgaaaatgatgactctgttgggggtttaaagaaatggtctgcataacctgaatgaaagaaggaaatgactattctctgaagacaaccaagagaaaattggaaaagacaaggtatgactttgttatgaacccctgcttttaggggtccaggaagggatttgtgggacttgaattcactaggcttaggtctttcaggaaacaggctatcaggggcatttatcatgtgtgagattggattctacttgggtgatttggtggatagacccatgaatggcccctgggggttttcaatcttggattggaggtgggggtttcagagtgttgccacgtctagctcctctccc

SEQ ID NO: 83 - DNA, 7525 bp, Homo sapiens
cccgggcgagcccgccgtgcgcacagctctgcccgccgcccctggagcggatccccagccgtccctgggcgttctcccgggttctagcaaagccccccggggtgcccatcagtttccttgggtgactacagcgtgtgttttttctttcctctttcccctgcctgtgtgcccttctccaggatggcagaggcggaattgcacaaggaaaggctgcaagccatagcagaaaaaagaaagaggcagactgaaatagaaggcaagcgacaacagcttgacgagcagatacttctgctgcagcattccaagtccaaagtgcttcgggagaaatggctgctgcagggcatacccgctggaactgccgaagaggaggaagccaggaggcggcagtctgaagaggatgagttcagagtcaagcaacttgaagataacattcagaggctggagcaagaaatacaaacgctagaaagtgaagagtcccagatatctgccaaagagcaaatcatcctagagaaactgaaggaaacagaaaaatccttcaaggactttcagaagggtttctccagtacggatggagatgcagtaaattacatttcctcccagcttcccgacctgccaatcctctgttcacgaacagcagaaccatcacctgggcaggacgggaccagcagagcggctggagtcgggtgggagaatgtgctgctaaaggaaggtgagtcagcctcgaacgccacagaaacatccggcccagacatgactatcaagaagcctccccagctttctgaggatgatatctggctaaaaagcgagggagacaactatagtgccaccctcctggagcctgctgccagctctctttccccagatcacaaaaacatggaaattgaggtgtctgttgcagaatgtaaaagtgttcctggaatcacctctaccccacatcccatggaccatccctccgctttctattcacccccgcataatggcctccttactgatcaccacgaatccctggataatgatgttgccagagagatccgctatctagatgaggtgctagaggccaactgctgtgattctgctgtggatggaacgtacaatggaacatcctccccagagcctggtgcagtggttctggtgggcggcctaagcccccctgtccacgaggcgacccagccagaacccactgaaagaacagctagccggcaggcacctcctcacatcgagctcagtaatagcagccctgaccccatggcagaggcagaaagaacaaatggccattcccccagccagcctagagatgcgctgggggacagcctgcaggtgcctgtcagccccagctccacaaccagctcacggtgttcttcccgagatggagagttcactctcaccacactgaaaaaggaggccaagtttgagctgcgtgccttccatgaggacaagaagccctccaagctctttgaggatgacgagcatgagaaagaacaatactgcattagaaaagtgaggccttcagaggagatgctggagctggaaaaggagaggagagagctcatccgcagccaggccgtcaagaagaatcctggcattgcagcaaaatggtggaatcccccgcaggaaaaaaccatcgaggagcagctggacgaggaacatctggagtcgcacaaaaagtacaaggagcgcaaagagagaagggcacagcaggaacagttgctgctgcagaagcagttacagcagcagcagcagcagcccccatcgcagctctgcacagcccctgcctcttctcatgaacgcgcaagcatgattgacaaagcaaaggaggacattgtcacagagcagatagatttctctgctgctcgcaaacaatttcagctgatggagaattccaggcaagcggtggccaagggccagagtacacccaggctgttctccatcaagcctttctacaggcctctggggtcagtcaactcagacaagccactgactaatccgagaccaccttctgtcgggggacctccagaagacagtggtgcctcagccgccaagggacagaaatcccccggtgccctggagaccccatcggcagcaggaagccagggcaacacagcctctcaggggaaggaagggccctacagcgagccttctaaacgtgggcccttatctaaactgtgggctgaggatggagaatttacgagcgcccgggctgtcctcactgtggtcaaggatgatgaccatgggattttggatcagttctcaagatctgtcaatgtctccttgacccaagaggagcttgactctggtctggacgaattgtcggtgaggtctcaggataccacagtcctggagaccctatccaatgatttcagcatggacaacatcagtgacagcggggcatccaatgagacaaccaatgccctccaggaaaattcactggctgatttttctctgccccagacaccacaaactgacaacccctcagagggccgaggagaaggcgtctccaagtcatttagtgatcatggtttctattccccttcctccacgctgggggactctccgttggttgatgaccccttggagtatcaggctggcctcctggtgcagaatgccattcaacaagccatagccgagcaggtggataaagctgtgtccaaaaccagcagggatggagcagagcaacagggacctgaagcgactgtagaggaagctgaagctgcggctttcggctcagaaaagcctcagagcatgtttgagccacctcaggtgtcttctcctgttcaagagaaaagggatgtattaccaaagattctgcctgctgaagacagggcgctcagggaaagggggcccccccagccactgccagctgtgcagcccagtggcccgattaacatggaggagaccaggcccgaaggaagctatttcagcaagtactcggaggcagctgagctgagaagcacagcctccctcctggccactcaagaatctgacgtgatggttgggcctttcaagctgaggtccaggaaacagcggactttgtccatgattgaggaagagatccgagcagctcaggaaagggaagaggagctgaagaggcagagacaagtcttgcagagtacgcagagccccaggacaaagaatgccccatcactgccctccagaacatgctacaaaactgctccagggaaaatagagaaagtcaaacctcctccatcccccaccactgaaggccccagcctgcagcctgacttagcccctgaagaggctgccggaacccagcggcccaagaatctgatgcagaccctcatggaagactatgagacacacaaatctaaaaggcgcgagagaatggatgatagtagttacacttctaagttactgtcttgcaaggtgacttccgaggtcctcgaggccacacgggttaatcgaagaaagagcgcactggctttgcgctgggaagcagggatctatgccaaccaggaggaagaagacaacgaataaacttccttcaacccaggaagcgtctttggtgcttgggagaccaagaaaccaagaaattaacaactgaaagcattttaatggactatttattaaagtgcaaacaaactcagcaatccttatgtagaccagaagctgcaatatacaatgatgaaaatgaaacgaaaaggaagtccccccatcagactctggacacccaggaatcaaaagagaaaggacttttttggtgactcaatcccagtgtctggtttggggccaatctacaatggatccaaaaggacaaaacatgttacaagcaaatcaacatagttgctgcaggcggaactgagaccagcctctctgggcgatgaaggacaatggtggtagggccacttagagagcagtagggcccaggctggtgcagcctacatggcacaggatatttccctgcaccagtttcccacctgtcacttgcagcatcagagggtgttgcattaactccattttctccagcagccataaaatgaatggcgtttctctccatatttgcccagaagaggcagttatgattccacttctcctacatttaattatttttaattgagaacaactcatgatcacaattcataaaatccatattttaagacaatagttcttcatgtcacaaacacaatctattctacatgaggaggctgagaaaggggaagagaaaaacaaaccaaatggatgatgttagctttaggatcgtgtctgcttataatattcactgatctgcagtttatgagaacacattttcacagttatgtttcttcataggaaaactatatttagtgggcaacaactatttttatgatgggatgggggagtatatacacgtatagaatctgtacgcgttgaacaacttggttcaagatggtgggggcatttttagagcggcaataattgaaaaaaaaggcgaactctgccttggagaggtagatgataagaaataaaaaggtgtttataactattttgtattataaagtgggccttagagataggaagaagaatgatggattccttttggatcaatcagaaaggaaacacgaaagaaaagtcaggaaggtagagagagaaaaagggagggaaggagaaagaatgggaataaaataaggaggtaagagatactatttttgctgagcaaccagtgtgtttcaggatgatacaaagaaaaatatagaatagaaataagtgcaggcttggaatcagctacaaatcctaaagatggggtgtgtgtggatgtgtgtgtgtgtgtgtgtacaccattgtgtgtttgtaaaatgtgtatgttcatgagtaagggtgtgtgtgtgtgtgtattaaaattccagagtgaccgtggcacttgggtgtacaggtaattcctccagagctgtttgctggcttcaggagtggagtgagaatttcttttttatgaaaagggatataaaggcaccgagctgatgcagtatttgtaatattaagttgacctaacaaggtatttgcatgagtcacaattacaaagttttgagcggttttgtaatttgacatttaggaaagtctcctatttattctcatactttacattcatgcttagtatactatagaggatgccagctttaatctttctgtcatttaaagccatatgataagggtattcaataattgggtgccctaaatttctggatgagaaaattttcaattctggccatgagaaagaaaaaaaaataaacagccttctttttttttcctttgttttaaaactgtggttttttaaaaaagcaataattaactcagacctcactaaaaatcatttttgtttttatattgttatgtcataagctctattatgttattctaacaagtagcaatttcacaaaatttgtatgtagatgttaacgcacatttcctttgcttcttttattagactagtgttgactttggggggggacatttattcacaaatgagaagtaggcacaaagtaaaaaatggaaccatctactaacaaggatcctttaaaactgccaagggagctctaacttgaagccacatcctacagatggcagcccaaatagcacatgggcaattggcaccatctttatatggttgagtctcctgaatattttgaatgaattctcaacaaaatgtgctagccactggggacgcaaaacaagtaagatccctgttgcaagaaattcattttatagtgagggaggttggcatggagactaaaattctcaggaaaatgagatccgtgttagattagaagtcctgatgtgaaatgggaggactcaggaaggaggatcgtctttacctgaggatttctagccagaggtcccagatgcctgggctgagaacccagcgataagggggcgttcccaaagcagacacagggataagaacagaggaggcagcagcattgcacagccccaggcacagtggcagttaggatggctggagagtaggatagttctatgggttgcccaaaaaatgtgatgcgcttcatgttttctctgactcatggatctggtagagaccatagacatgatatagactaacttccccatttttcacaatgaaggtaaaccatccttatgacttaccttaaagttttttgttctgttttgaaggaaaccatgtgcttcatgaaacctacagttgacaagagaatgtacagctaagagaaaagcttaagaggccacactattcgcggaatggctttagaggcagatgaagtggtctttgaccacagttgattgaaccagagcacttattgcttaaagaataacagagttctagagctgggggttcttgggccatgctccgtgtgtggataaggaaagaaatactgtttctgggactctcccacagtcacaaagctgttttcactgtggcccctacatctcttaacttttgctattactcctatgctgccttccggattactgctgtctatcttcttgctccactcactgaagatcctattataatcccatgaaaatgtaaattacagtttacttgggagagccagattttctctgtgctcttgagttttttattcattcaagaaaccttgggccaccgctttgtacatagcaccgtgctaggctctgggatcccaaatggacccttttaactttctgaagatgggaccgtcccctggaggaaagtcattcctgcctaatccatcgagagaaagaggcttacgaaaaactttgcctctgatgctcagccccacccccaaatagcacacaagcttgttaaccccacctcttacaaaatgtttagattctgtaggtgttaaaagcctttctggaagtattgcattctgccgtgtttataggtgttcactttcctccagagctgattaactactgacatgacttggctttctcatccagaaattatggaaacagggtctgtcagtggcaggaggccgtgctgtgttttacttggatgacacaatgcagtttacttgcctcttcatacccatgcatgctgctcaccctagacaatgacatataagccgtatatagatcaatgtccacatatatatacacacacacatatatatatataaagtgtaacaaggaacactaaaacagtgttgattcttgtctctgaagacaaataattaaaccttttttttcccaactaaagaatggatttaattaaactatgtattgaaaaaaaagtagcctaagtgttagagatggtgaatatattccattttagttaaagaacaaatttcctgaattttaagcattcagtgagctgccaattttgattttgtgttgctctttacccaaattattttttctttgtttttctttttttgggggaggaggggaaaaaagcagcaatactgtgtttggaaattatactctgtatctggttttcctgtgtatgttaaccacttaaatgttattatcctgctttggttttagagtgattgtgaggcattcaatgcaagtatacagttattttctcattaaaatccaatgtgtgttgagtttttataaaaaaaaaaaaaaaaaa

SEQ ID NO: 84 - DNA, 2929 bp, Homo sapiens
gcggcttgttgataatatggcggctggagctgcctgggcatcccgaggaggcggtggggcccactcccggaagaagggtcccttttcgcgctagtgcagcggcccctctggacccggaagtccgggccggttgctgaatgaggggagccgggccctccccgcgccagtccccccgcaccctccgtcccgacccgggccccgccatgtccttcttccggcggaaagtgaaaggcaaagaacaagagaagacctcagatgtgaagtccattaaagcttcaatatccgtacattccccacaaaaaagcactaaaaatcatgccttgctggaggctgcaggaccaagtcatgttgcaatcaatgccatttctgccaacatggactccttttcaagtagcaggacagccacacttaagaagcagccaagccacatggaggccgctcattttggtgacctgggcagatcttgtctggactaccagactcaagagaccaaatcaagcctttctaagacccttgaacaagtcttgcacgacactattgtcctcccttacttcattcaattcatggaacttcggcgaatggagcatttggtgaaattttggttagaggctgaaagttttcattcaacaacttggtcgcgaataagagcacacagtctaaacacagtgaagcagagctcactggctgagcctgtctctccatctaaaaagcatgaaactacagcgtcttttttaactgattctcttgataagagattggaggattctggctcagcacagttgtttatgactcattcagaaggaattgacctgaataatagaactaacagcactcagaatcacttgctgctttcccaggaatgtgacagtgcccattctctccgtcttgaaatggccagagcaggaactcaccaagtttccatggaaacccaagaatcttcctctacacttacagtagccagtagaaatagtcccgcttctccactaaaagaattgtcaggaaaactaatgaaaagtatagaacaagatgcagtgaatacttttaccaaatatatatctccagatgctgctaaaccaataccaattacagaagcaatgagaaatgacatcatagcaaggatttgtggagaagatggacaggtggatcccaactgtttcgttttggcacagtccatagtctttagtgcaatggagcaagagcactttagtgagtttctgcgaagtcaccatttctgtaaataccagattgaagtgctgaccagtggaactgtttacctggctgacattctcttctgtgagtcagccctcttttatttctctgagtacatggaaaaagaggatgcagtgaatatcttacaattctggttggcagcagataacttccagtctcagcttgctgccaaaaagggccaatatgatggacaggaggcacagaatgatgccatgattttatatgacaagtacttctccctccaagccacacatcctcttggatttgatgatgttgtacgattagaaattgaatccaatatctgcagggaaggtgggccactccccaactgtttcacaactccattacgtcaggcctggacaaccatggagaaggtctttttgcctggctttttgtccagcaatctttattataaatatttgaatgatctcatccattcggttcgaggagatgaatttctgggcgggaacgtgtcgctgactgctcctggctctgttggccctcctgatgagtctcacccagggagttctgacagctctgcgtctcagtccagtgtgaaaaaagccagtattaaaatactgaaaaattttgatgaagcgataattgtggatgcggcaagtctggatccagaatctttatatcaacggacatatgccgggaagatgacatttggaagagtcagtgacttggggcaattcatccgagaatctgagcctgaacctgatgtaaggaaatcaaaaggatccatgttctcacaagctatgaagaaatgggtgcaaggaaatactgatgaggcccaggaagagctagcttggaagattgctaaaatgatagtcagtgacattatgcagcaggctcagtatgatcaaccgttagagaaatctacaaagttatgactcaaaacttgagataaaggaaatctgcttgtgaaaaataagagaacttttttcccttggttggattcttcaacacagccaatgaaaacagcactatatttctgatctgtcactgttgtttccaggagagaatgggagacaatcctagacttccaccataatgcagttacctgtaggcataattgatgcacatgatgttcacacagtgagagtcttaaagatacaaaatggtattgtttacattactagaaaattattagttttccaatggcaataacccatttatgagagtgttttagcctactggaatagacagggaccacatcctctgggaagcagataagcatagaactgatacttgatgcacactcgtagtggtaactcatccctaatcagcattgtaaagcaggtgccagaggtggtttgctttgtccttccaaagcaggtgagtcagccccaccgagagccaggcagctttgagtggcagcgtggtgctagcagcttcagcggaacagggtgagagttaattatgcagtcttcttgacagcggcattaatttggaaggaaactgacaagtcatgggtcaagtttcagtgacttcctccttcctctgatggcagtatatagttttcacattttaattcctcctcctgagatgcactatacttaaaaccattctctcccctgctaacagaagggtgtgaatctggtttactttgagcattaggatttgcccctttggaattctgcactccagttacttaactttcccttcagaatacatgtggaaaaaaaaaaaaaaa

SEQ ID NO: 85 - DNA, 2391 bp, Homo sapiens
atgctgcgaggcggacggcgcgggcagcttggctggcacagctgggctgcggggccgggcagcctgctggcttggctgatactggcatctgcgggcgccgcaccctgccccgatgcctgctgcccccacggctcctcgggactgcgatgcacccgggatggggccctggatagcctccaccacctgcccggcgcagagaacctgactgagctctacatcgagaaccagcagcatctgcagcatctggagctccgtgatctgaggggcctgggggagctgagaaacctcaccatcgtgaagagtggtctccgtttcgtggcgccagatgccttccatttcactcctcggctcagtcgcctgaatctctccttcaacgctctggagtctctctcctggaaaactgtgcagggcctctccttacaggaactggtcctgtcggggaaccctctgcactgttcttgtgccctgcgctggctacagcgctgggaggaggagggactgggcggagtgcctgaacagaagctgcagtgtcatgggcaagggcccctggcccacatgcccaatgccagctgtggtgtgcccacgctgaaggtccaggtgcccaatgcctcggtggatgtgggggacgacgtgctgctgcggtgccaggtggaggggcggggcctggagcaggccggctggatcctcacagagctggagcagtcagccacggtgatgaaatctgggggtctgccatccctggggctgaccctggccaatgtcaccagtgacctcaacaggaagaacgtgacgtgctgggcagagaacgatgtgggccgggcagaggtctctgttcaggtcaacgtctccttcccggccagtgtgcagctgcacacggcggtggagatgcaccactggtgcatccccttctctgtggatgggcagccggcaccgtctctgcgctggctcttcaatggctccgtgctcaatgagaccagcttcatcttcactgagttcctggagccggcagccaatgagaccgtgcggcacgggtgtctgcgcctcaaccagcccacccacgtcaacaacggcaactacacgctgctggctgccaaccccttcggccaggcctccgcctccatcatggctgccttcatggacaaccctttcgagttcaaccccgaggaccccatccctgtctccttctcgccggtggacactaacagcacatctggagacccggtggagaagaaggacgaaacaccttttggggtctcggtggctgtgggcctggccgtctttgcctgcctcttcctttctacgctgctccttgtgctcaacaaatgtggacggagaaacaagtttgggatcaaccgcccggctgtgctggctccagaggatgggctggccatgtccctgcatttcatgacattgggtggcagctccctgtcccccaccgagggcaaaggctctgggctccaaggccacatcatcgagaacccacaatacttcagtgatgcctgtgttcaccacatcaagcgccgggacatcgtgctcaagtgggagctgggggagggcgcctttgggaaggtcttccttgctgagtgccacaacctcctgcctgagcaggacaagatgctggtggctgtcaaggcactgaaggaggcgtccgagagtgctcggcaggacttccaacgtgaggctgagctgctcaccatgctgcagcaccagcacatcgtgcgcttcttcggcgtctgcaccgagggccgccccctgctcatggtcttcgagtatatgcggcacggggacctcaaccgcttcctccgatcccatggacccgatgccaagctgctggctggtggggaggatgtggctccaggccccctgggtctggggcagctgctggccgtggctagccaggtcgctgcggggatggtgtacctggcgggtctgcattttgtgcaccgggacctggccacacgcaactgtctagtgggccagggactggtggtcaagattggtgattttggcatgagcagggatatctacagcaccgactattaccgtgtgggaggccgcaccatgctgcccattcgctggatgccgcccgagagcatcctgtaccgtaagttcaccaccgagagcgacgtgtggagcttcggcgtggtgctctgggagatcttcacctacggcaagcagccctggtaccagctctccaacacggaggcaatcgactgcatcacgcagggacgtgagttggagcggccacgtgcctgcccaccagaggtctacgccatcatgcggggctgctggcagcgggagccccagcaacgccacagcatcaaggatgtgcacgcccggctgcaagccctggcccaggcacctcctgtctacctggatgtcctgggctag

SEQ ID NO: 86 - DNA, 5057 bp, Homo sapiens
  misc_feature (3995)..(3997): "n" = a, t, g, or c.
  misc_feature (4906)..(4906): "n" = a, t, g, or c.
  misc_feature (4923)..(4923): "n" = a, t, g, or c.
  misc_feature (4932)..(4932): "n" = a, t, g, or c.
  misc_feature (4995)..(4995): "n" = a, t, g, or c.
  misc_feature (5028)..(5028): "n" = a, t, g, or c.
  misc_feature (5056)..(5056): "n" = a, t, g, or c.
ggctcctgaggcgcacagcgccgagcgcggcgccgcgcacccgcgcgccggacgccagtgaccgcgatggtgaactccagtcgcgtgcagcctcagcagcccggggacgccaagcggccgcccgcgccccgcgcgccggacccgggccggctgatggctggctgcgcggccgtgggcgccagcctcgccgccccgggcggcctctgcgagcagcggggcctggagatcgagatgcagcgcatccggcaggcggccgcgcgggaccccccggccggagccgcggcctccccttctcctccgctctcgtcgtgctcccggcaggcgtggagccgcgataaccccggcttcgaggccgaggaggaggaggaggaggtggaaggggaagaaggcggaatggtggtggagatggacgtagagtggcgcccgggcagccggaggtcggccgcctcctcggccgtgagctccgtgggcgcgcggagccgggggcttgggggctaccacggcgcgggccacccgagcgggaggcggcgccggcgagaggaccagggcccgccgtgccccagcccagtcggcggcggggacccgctgcatcgccacctccccctggaagggcagccgccccgagtggcctgggcggagaggctggttcgcgggctgcgaggtctctggggaacaagactcatggaggaaagcagcactaaccgagagaaataccttaaaagtgttttacgggaactggtcacatacctcctttttctcatagtcttgtgcatcttgacctacggcatgatgagctccaatgtgtactactacacccggatgatgtcacagctcttcctagacacccccgtgtccaaaacggagaaaactaactttaaaactctgtcttccatggaagacttctggaagttcacagaaggctccttattggatgggctgtactggaagatgcagcccagcaaccagactgaagctgacaaccgaagtttcatcttctatgagaacctgctgttaggggttccacgaatacggcaactccgagtcagaaatggatcctgctctatcccccaggacttgagagatgaaattaaagagtgctatgatgtctactctgtcagtagtgaagatagggctccctttgggccccgaaatggaaccgcttggatctacacaagtgaaaaagacttgaatggtagtagccactggggaatcattgcaacttatagtggagctggctattatctggatttgtcaagaacaagagaggaaacagctgcacaagttgctagcctcaagaaaaatgtctggctggaccgaggaaccagggcaacttttattgacttctcagtgtacaacgccaacattaacctgttctgtgtggtcaggttattggttgaattcccagcaacaggtggtgtgattccatcttggcaatttcagcctttaaagctgatccgatatgtcacaacttttgatttcttcctggcagcctgtgagattatcttttgtttctttatcttttactatgtggtggaagagatattggaaattcgcattcacaaactacactatttcaggagtttctggaattgtctggatgttgtgatcgttgtgctgtcagtggtagctataggaattaacatatacagaacatcaaatgtggaggtgctactacagtttctggaagatcaaaatactttccccaactttgagcatctggcatattggcagatacagttcaacaatatagctgctgtcacagtattttttgtctggattaagctcttcaaattcatcaattttaacaggaccatgagccagctctcgacaaccatgtctcgatgtgccaaagacctgtttggctttgctattatgttcttcattattttcctagcgtatgctcagttggcataccttgtctttggcactcaggtcgatgacttcagtactttccaagagtgtatcttcactcaattccgtatcattttgggcgatatcaactttgcagagattgaggaagctaatcgagttttgggaccaatttatttcactacatttgtgttctttatgttcttcattcttttgaatatgtttttggctatcatcaatgatacttactctgaagtgaaatctgacttggcacagcagaaagctgaaatggaactctcagatcttatcagaaagggctaccataaagctttggtcaaactaaaactgaaaaaaaataccgtggatgacatttcagagagtctgcggcaaggaggaggcaagttaaactttgacgaacttcgacaagatctcaaagggaagggccatactgatgcagagattgaggcaatattcacaaagtacgaccaagatggagaccaagaactgaccgaacatgaacatcagcagatgagagacgacttggagaaagagagggaggacctggatttggatcacagttctttaccacgtcccatgagcagccgaagtttccctcgaagcctggatgactctgaggaggatgacgatgaagatagcggacatagctccagaaggaggggaagcatttctagtggcgtttcttacgaagagtttcaagtcctggtgagacgagtggaccggatggagcattccatcggcagcatagtgtccaagattgacgccgtgatcgtgaagctagagattatggagcgagccaaactgaagaggagggaggtgctgggaaggctgttggatggggtggccgaggatgaaaggctgggtcgtgacagtgaaatccatagggaacagatggaacggctagtacgtgaagagttggaacgctgggaatccgatgatgcagcttcccagatcagtcatggtttaggcacgccagtgggactaaatggtcaacctcgccccagaagctcccgcccatcttcctcccaatctacagaaggcatggaaggtgcaggtggaaatgggagttctaatgtccacgtatgatatgtgtgtttcagtatgtgtgtttctaataagtgaggaagtggctgtcctgaattgctgtaacaagcacactatttatatgccctgaccaccataggatgctagtctttgtgaccgattgctaatcttctgcactttaatttattttatataaactttacccatggttcaaagatttttttttctttttctcatataagaaatctaggtgtaaatattgagtacagaaaaaaaatcttcatgatgtgtattgagcggtacgcccagttgccaccatgactgagtcttctcagttgacaatgaagtagccttttaaagctagaaaactgtcaaagggcttctgagtttcatttccagtcacaaaaatcagtattgttatttttttccaagagtgtgaaggaaaatggggcaattcctttccactctggcatagttcatgagcttaatacatagctttcttttaagaaaggagccttttttttcaactagcttcctggggtaaacttttctaaaagataaaatgggaaggaactccaaactatgatagaatctgtgtgaatggttaagatgaatgttaaatactatgcttttttgtaagttgatcgtatctgatgtctgtgggactaactgtatcacttaatttttaccttattttggctctaatttgaataagctgagtaaaaccaccaaagatcagttataggataaaatggcatctctaaccataacacaggagaattggaaggagccctaagttgtcactcagtttaatttcttttaatggttagtttagcctaaagatttatctgcatattctttttcccatgtggctctactcatttgcaactgaatttaatgttataactcatctagtgagaccaacttactaaatttttagtatgcactgaaagtttttatccaacaattatgttcattttaagcaaaattttaagaaagttttgaaattcataaagcatttggttttaaactattttaagaatatagtactcggtcaggtatgnnncacgcctgtaatcccagcactttgggaggccgaaacaggcgaatcacttgagcccaggagttcaagaccaacatgggcaatgtggcgaaactccatctctacaaaaaatgcaaaaataaaaaatatagtactcaagtattcttgatcctgtgtttcaaaactagaatttgtaatgcaaatggagctcagtctaataaaaaagaggttttggtattaaaagttcatacattagacagtatcagccaaaatttgagttagcaacactgttttctttacgagagggtctcacccaaatttatggggagaaatctatttctcaaaaaaaaaaaatcttcttttacagaaatgttgagtaaggtgacattttgagcgctaataagcaaaagagcatgcagtgctgttgaataaccctcacttggagaaccaagagaatcctgtcgtttaatgctatattttaatttcacaagttgttcatttaactggtagaatgtcagtccaatctccaatgagaacatgagcaaatagacctttccaggttgaaagtgaaacatactgggtttctgtaagtttttcctcatggcttcatctctatctttactttctcttgaatatgctacacaaagttctttattactacatactaaagtttgcattccagggatattgactgtacatatttatgtatatgtaccatgttgttacatgtaaacaaacttcaatttgaagtgcagctattatgtggtatccatgtgtatcgaccatgtgccatatatcaattatggtcactagaaagtctctttatgatactttttattgtactgtttttcatttcacttgcaaaattttgcagaattcctcctttctacccataaattacatataatttttcttctttagtcatggagaacncccccccatcatctcanccctattanctttcccatgtgtactggtattattaaaaagacatttacatacgcaagtttttcactgacaancaagaatgttattaatgtgtaatactgagcacntttacttcttaataaaaacttgatatant

SEQ ID NO: 87 - DNA, 4987 bp, Homo sapiens
gagtggagttctggaggaatgtttaccagacacagagcccagagggacagcgcccagagcccagatagagagacacggcctcactggctcagcaccagggtccccttccccctcctcagctccctccctggcccctttaagaaagagctgatcctctcctctcttgagttaacccctgattgtccaggtggcccctggctctggcctggtgggcggaggcaaagggggagccaggggcggagaaagggttgcccaagtctgggagtgagggaaggaggcaggggtgctgagaaggcggctgctgggcagagccggtggcaagggcctcccctgccgctgtgccaggcaggcagtgccaaatccggggagcctggagctggggggagggccggggacagcccggccctgccccctcccccgctgggagcccagcaacttctgaggaaagtttggcacccatggcgtggcggtgccccaggatgggcagggtcccgctggcctggtgcttggcgctgtgcggctgggcgtgcatggcccccaggggcacgcaggctgaagaaagtcccttcgtgggcaacccagggaatatcacaggtgcccggggactcacgggcacccttcggtgtcagctccaggttcagggagagccccccgaggtacattggcttcgggatggacagatcctggagctcgcggacagcacccagacccaggtgcccctgggtgaggatgaacaggatgactggatagtggtcagccagctcagaatcacctccctgcagctttccgacacgggacagtaccagtgtttggtgtttctgggacatcagaccttcgtgtcccagcctggctatgttgggctggagggcttgccttacttcctggaggagcccgaagacaggactgtggccgccaacacccccttcaacctgagctgccaagctcagggacccccagagcccgtggacctactctggctccaggatgctgtccccctggccacggctccaggtcacggcccccagcgcagcctgcatgttccagggctgaacaagacatcctctttctcctgcgaagcccataacgccaagggggtcaccacatcccgcacagccaccatcacagtgctcccccagcagccccgtaacctccacctggtctcccgccaacccacggagctggaggtggcttggactccaggcctgagcggcatctaccccctgacccactgcaccctgcaggctgtgctgtcagacgatgggatgggcatccaggcgggagaaccagaccccccagaggagcccctcacctcgcaagcatccgtgcccccccatcagcttcggctaggcagcctccatcctcacaccccttatcacatccgcgtggcatgcaccagcagccagggcccctcatcctggacccactggcttcctgtggagacgccggagggagtgcccctgggcccccctgagaacattagtgctacgcggaatgggagccaggccttcgtgcattggcaagagccccgggcgcccctgcagggtaccctgttagggtaccggctggcgtatcaaggccaggacaccccagaggtgctaatggacatagggctaaggcaagaggtgaccctggagctgcagggggacgggtctgtgtccaatctgacagtgtgtgtggcagcctacactgctgctggggatggaccctggagcctcccagtacccctggaggcctggcgcccagtgaaggaaccttcaactcctgccttctcgtggccctggtggtatgtactgctaggagcagtcgtggccgctgcctgtgtcctcatcttggctctcttccttgtccaccggcgaaagaaggagacccgttatggagaagtgtttgaaccaacagtggaaagaggtgaactggtagtcaggtaccgcgtgcgcaagtcctacagtcgtcggaccactgaagctaccttgaacagcctgggcatcagtgaagagctgaaggagaagctgcgggatgtgatggtggaccggcacaaggtggccctggggaagactctgggagagggagagtttggagctgtgatggaaggccagctcaaccaggacgactccatcctcaaggtggctgtgaagacgatgaagattgccatctgcacgaggtcagagctggaggatttcctgagtgaagcggtctgcatgaaggaatttgaccatcccaacgtcatgaggctcatcggtgtctgtttccagggttctgaacgagagagcttcccagcacctgtggtcatcttacctttcatgaaacatggagacctacacagcttcctcctctattcccggctcggggaccagccagtgtacctgcccactcagatgctagtgaagttcatggcagacatcgccagtggcatggagtatctgagtaccaagagattcatacaccgggacctggcggccaggaactgcatgctgaatgagaacatgtccgtgtgtgtggcggacttcgggctctccaagaagatctacaatggggactactaccgccagggacgtatcgccaagatgccagtcaagtggattgccattgagagtctagctgaccgtgtctacaccagcaagagcgatgtgtggtccttcggggtgacaatgtgggagattgccacaagaggccaaaccccatatccgggcgtggagaacagcgagatttatgactatctgcgccagggaaatcgcctgaagcagcctgcggactgtctggatggactgtatgccttgatgtcgcggtgctgggagctaaatccccaggaccggccaagttttacagagctgcgggaagatttggagaacacactgaaggccttgcctcctgcccaggagcctgacgaaatcctctatgtcaacatggatgagggtggaggttatcctgaaccccctggagctgcaggaggagctgaccccccaacccagccagaccctaaggattcctgtagctgcctcactgcggctgaggtccatcctgctggacgctatgtcctctgcccttccacaacccctagccccgctcagcctgctgataggggctccccagcagccccagggcaggaggatggtgcctgagacaaccctccacctggtactccctctcaggatccaagctaagcactgccactggggaaaactccaccttcccactttcccaccccacgccttatccccacttgcagccctgtcttcctacctatcccacctccatcccagacaggtccctccccttctctgtgcagtagcatcaccttgaaagcagtagcatcaccatctgtaaaaggaaggggttggattgcaatatctgaagccctcccaggtgttaacattccaagactctagagtccaaggtttaaagagtctagattcaaaggttctaggtttcaaagatgctgtgagtctttggttctaaggacctgaaattccaaagtctctaattctattaaagtgctaaggttctaaggcctacttttttttttttttttttttttttttttttttttgcgatagagtctcactgtgtcacccaggctggagtgcagtggtgcaatctcgcctcactgcaaccttcacctaccgagttcaagtgattttcctgccttggcctcccaagtagctgggattacaggtgtgtgccaccacacccggctaatttttatatttttagtagagacagggtttcaccatgttggccaggctggtctaaaactcctgacctcaagtgatctgcccacctcagcctcccaaagtgctgagattacaggcatgagccactgcactcaaccttaagacctactgttctaaagctctgacattatgtggttttagattttctggttctaacatttttgataaagcctcaaggttttaggttctaaagttctaagattctgattttaggagctaaggctctatgagtctagatgtttattcttctagagttcagagtccttaaaatgtaagattatagattctaaagattctatagttctagacatggaggttctaaggcctaggattctaaaatgtgatgttctaaggctctgagagtctagattctctggctgtaaggctctagatcataaggcttcaaaatgttatcttctcaagttctaagattctaatgatgatcaattatagtttctgaggctttatgataatagattctcttgtataagatcctagatcctaagggtcgaaagctctagaatctgcaattcaaaagttccaagagtctaaagatggagtttctaaggtccggtgttctaagatgtgatattctaagacttactctaagatcttagattctctgtgtctaagattctagatcagatgctccaagattctagatgattaaataagattctaacggtctgttctgtttcaaggcactctagattccattggtccaagattccggatcctaagcatctaagttataagactctcacactcagttgtgactaactagacaccaaagttctaataatttctaatgttggacacctttaggttctttgctgcattctgcctctctaggaccatggttaagagtccaagaatccacatttctaaaatcttatagttctaggcactgtagttctaagactcaaatgttctaagtttctaagattctaaaggtccacaggtctagactattaggtgcaatttcaaggttctaaccctatactgtagtattctttggggtgcccctctccttcttagctatcattgcttcctcctccccaactgtgggggtgtgcccccttcaagcctgtgcaatgcattagggatgcctcctttcccgcaggggatggacgatctcccacctttcgggccatgttgcccccgtgagccaatccctcaccttctgagtacagagtgtggactctggtgcctccagaggggctcaggtcacataaaactttgtatatcaacgaaaaaaa

SEQ ID NO: 88 - DNA, 5014 bp, Homo sapiens
gagtggagttctggaggaatgtttaccagacacagagcccagagggacagcgcccagagcccagatagagagacacggcctcactggctcagcaccagggtccccttccccctcctcagctccctccctggcccctttaagaaagagctgatcctctcctctcttgagttaacccctgattgtccaggtggcccctggctctggcctggtgggcggaggcaaagggggagccaggggcggagaaagggttgcccaagtctgggagtgagggaaggaggcaggggtgctgagaaggcggctgctgggcagagccggtggcaagggcctcccctgccgctgtgccaggcaggcagtgccaaatccggggagcctggagctggggggagggccggggacagcccggccctgccccctcccccgctgggagcccagcaacttctgaggaaagtttggcacccatggcgtggcggtgccccaggatgggcagggtcccgctggcctggtgcttggcgctgtgcggctgggcgtgcatggcccccaggggcacgcaggctgaagaaagtcccttcgtgggcaacccagggaatatcacaggtgcccggggactcacgggcacccttcggtgtcagctccaggttcagggagagccccccgaggtacattggcttcgggatggacagatcctggagctcgcggacagcacccagacccaggtgcccctgggtgaggatgaacaggatgactggatagtggtcagccagctcagaatcacctccctgcagctttccgacacgggacagtaccagtgtttggtgtttctgggacatcagaccttcgtgtcccagcctggctatgttgggctggagggcttgccttacttcctggaggagcccgaagacaggactgtggccgccaacacccccttcaacctgagctgccaagctcagggacccccagagcccgtggacctactctggctccaggatgctgtccccctggccacggctccaggtcacggcccccagcgcagcctgcatgttccagggctgaacaagacatcctctttctcctgcgaagcccataacgccaagggggtcaccacatcccgcacagccaccatcacagtgctcccccagcagccccgtaacctccacctggtctcccgccaacccacggagctggaggtggcttggactccaggcctgagcggcatctaccccctgacccactgcaccctgcaggctgtgctgtcagacgatgggatgggcatccaggcgggagaaccagaccccccagaggagcccctcacctcgcaagcatccgtgcccccccatcagcttcggctaggcagcctccatcctcacaccccttatcacatccgcgtggcatgcaccagcagccagggcccctcatcctggacccactggcttcctgtggagacgccggagggagtgcccctgggcccccctgagaacattagtgctacgcggaatgggagccaggccttcgtgcattggcaagagccccgggcgcccctgcagggtaccctgttagggtaccggctggcgtatcaaggccaggacaccccagaggtgctaatggacatagggctaaggcaagaggtgaccctggagctgcagggggacgggtctgtgtccaatctgacagtgtgtgtggcagcctacactgctgctggggatggaccctggagcctcccagtacccctggaggcctggcgcccagggcaagcacagccagtccaccagctggtgaaggaaccttcaactcctgccttctcgtggccctggtggtatgtactgctaggagcagtcgtggccgctgcctgtgtcctcatcttggctctcttccttgtccaccggcgaaagaaggagacccgttatggagaagtgtttgaaccaacagtggaaagaggtgaactggtagtcaggtaccgcgtgcgcaagtcctacagtcgtcggaccactgaagctaccttgaacagcctgggcatcagtgaagagctgaaggagaagctgcgggatgtgatggtggaccggcacaaggtggccctggggaagactctgggagagggagagtttggagctgtgatggaaggccagctcaaccaggacgactccatcctcaaggtggctgtgaagacgatgaagattgccatctgcacgaggtcagagctggaggatttcctgagtgaagcggtctgcatgaaggaatttgaccatcccaacgtcatgaggctcatcggtgtctgtttccagggttctgaacgagagagcttcccagcacctgtggtcatcttacctttcatgaaacatggagacctacacagcttcctcctctattcccggctcggggaccagccagtgtacctgcccactcagatgctagtgaagttcatggcagacatcgccagtggcatggagtatctgagtaccaagagattcatacaccgggacctggcggccaggaactgcatgctgaatgagaacatgtccgtgtgtgtggcggacttcgggctctccaagaagatctacaatggggactactaccgccagggacgtatcgccaagatgccagtcaagtggattgccattgagagtctagctgaccgtgtctacaccagcaagagcgatgtgtggtccttcggggtgacaatgtgggagattgccacaagaggccaaaccccatatccgggcgtggagaacagcgagatttatgactatctgcgccagggaaatcgcctgaagcagcctgcggactgtctggatggactgtatgccttgatgtcgcggtgctgggagctaaatccccaggaccggccaagttttacagagctgcgggaagatttggagaacacactgaaggccttgcctcctgcccaggagcctgacgaaatcctctatgtcaacatggatgagggtggaggttatcctgaaccccctggagctgcaggaggagctgaccccccaacccagccagaccctaaggattcctgtagctgcctcactgcggctgaggtccatcctgctggacgctatgtcctctgcccttccacaacccctagccccgctcagcctgctgataggggctccccagcagccccagggcaggaggatggtgcctgagacaaccctccacctggtactccctctcaggatccaagctaagcactgccactggggaaaactccaccttcccactttcccaccccacgccttatccccacttgcagccctgtcttcctacctatcccacctccatcccagacaggtccctccccttctctgtgcagtagcatcaccttgaaagcagtagcatcaccatctgtaaaaggaaggggttggattgcaatatctgaagccctcccaggtgttaacattccaagactctagagtccaaggtttaaagagtctagattcaaaggttctaggtttcaaagatgctgtgagtctttggttctaaggacctgaaattccaaagtctctaattctattaaagtgctaaggttctaaggcctacttttttttttttttttttttttttttttttttttgcgatagagtctcactgtgtcacccaggctggagtgcagtggtgcaatctcgcctcactgcaaccttcacctaccgagttcaagtgattttcctgccttggcctcccaagtagctgggattacaggtgtgtgccaccacacccggctaatttttatatttttagtagagacagggtttcaccatgttggccaggctggtctaaaactcctgacctcaagtgatctgcccacctcagcctcccaaagtgctgagattacaggcatgagccactgcactcaaccttaagacctactgttctaaagctctgacattatgtggttttagattttctggttctaacatttttgataaagcctcaaggttttaggttctaaagttctaagattctgattttaggagctaaggctctatgagtctagatgtttattcttctagagttcagagtccttaaaatgtaagattatagattctaaagattctatagttctagacatggaggttctaaggcctaggattctaaaatgtgatgttctaaggctctgagagtctagattctctggctgtaaggctctagatcataaggcttcaaaatgttatcttctcaagttctaagattctaatgatgatcaattatagtttctgaggctttatgataatagattctcttgtataagatcctagatcctaagggtcgaaagctctagaatctgcaattcaaaagttccaagagtctaaagatggagtttctaaggtccggtgttctaagatgtgatattctaagacttactctaagatcttagattctctgtgtctaagattctagatcagatgctccaagattctagatgattaaataagattctaacggtctgttctgtttcaaggcactctagattccattggtccaagattccggatcctaagcatctaagttataagactctcacactcagttgtgactaactagacaccaaagttctaataatttctaatgttggacacctttaggttctttgctgcattctgcctctctaggaccatggttaagagtccaagaatccacatttctaaaatcttatagttctaggcactgtagttctaagactcaaatgttctaagtttctaagattctaaaggtccacaggtctagactattaggtgcaatttcaaggttctaaccctatactgtagtattctttggggtgcccctctccttcttagctatcattgcttcctcctccccaactgtgggggtgtgcccccttcaagcctgtgcaatgcattagggatgcctcctttcccgcaggggatggacgatctcccacctttcgggccatgttgcccccgtgagccaatccctcaccttctgagtacagagtgtggactctggtgcctccagaggggctcaggtcacataaaactttgtatatcaacgaaaaaaa

SEQ ID NO: 89 - DNA, 4620 bp, Homo sapiens
cgccctcgccgcccgcggcgccccgagcgctttgtgagcagatgcggagccgagtggagggcgcgagccagatgcggggcgacagctgacttgctgagaggaggcggggaggcgcggagcgcgcgtgtggtccttgcgccgctgacttctccactggttcctgggcaccgaaagataaacctctcataatgaaggcccccgctgtgcttgcacctggcatcctcgtgctcctgtttaccttggtgcagaggagcaatggggagtgtaaagaggcactagcaaagtccgagatgaatgtgaatatgaagtatcagcttcccaacttcaccgcggaaacacccatccagaatgtcattctacatgagcatcacattttccttggtgccactaactacatttatgttttaaatgaggaagaccttcagaaggttgctgagtacaagactgggcctgtgctggaacacccagattgtttcccatgtcaggactgcagcagcaaagccaatttatcaggaggtgtttggaaagataacatcaacatggctctagttgtcgacacctactatgatgatcaactcattagctgtggcagcgtcaacagagggacctgccagcgacatgtctttccccacaatcatactgctgacatacagtcggaggttcactgcatattctccccacagatagaagagcccagccagtgtcctgactgtgtggtgagcgccctgggagccaaagtcctttcatctgtaaaggaccggttcatcaacttctttgtaggcaataccataaattcttcttatttcccagatcatccattgcattcgatatcagtgagaaggctaaaggaaacgaaagatggttttatgtttttgacggaccagtcctacattgatgttttacctgagttcagagattcttaccccattaagtatgtccatgcctttgaaagcaacaattttatttacttcttgacggtccaaagggaaactctagatgctcagacttttcacacaagaataatcaggttctgttccataaactctggattgcattcctacatggaaatgcctctggagtgtattctcacagaaaagagaaaaaagagatccacaaagaaggaagtgtttaatatacttcaggctgcgtatgtcagcaagcctggggcccagcttgctagacaaataggagccagcctgaatgatgacattcttttcggggtgttcgcacaaagcaagccagattctgccgaaccaatggatcgatctgccatgtgtgcattccctatcaaatatgtcaacgacttcttcaacaagatcgtcaacaaaaacaatgtgagatgtctccagcatttttacggacccaatcatgagcactgctttaataggacacttctgagaaattcatcaggctgtgaagcgcgccgtgatgaatatcgaacagagtttaccacagctttgcagcgcgttgacttattcatgggtcaattcagcgaagtcctcttaacatctatatccaccttcattaaaggagacctcaccatagctaatcttgggacatcagagggtcgcttcatgcaggttgtggtttctcgatcaggaccatcaacccctcatgtgaattttctcctggactcccatccagtgtctccagaagtgattgtggagcatacattaaaccaaaatggctacacactggttatcactgggaagaagatcacgaagatcccattgaatggcttgggctgcagacatttccagtcctgcagtcaatgcctctctgccccaccctttgttcagtgtggctggtgccacgacaaatgtgtgcgatcggaggaatgcctgagcgggacatggactcaacagatctgtctgcctgcaatctacaaggttttcccaaatagtgcaccccttgaaggagggacaaggctgaccatatgtggctgggactttggatttcggaggaataataaatttgatttaaagaaaactagagttctccttggaaatgagagctgcaccttgactttaagtgagagcacgatgaatacattgaaatgcacagttggtcctgccatgaataagcatttcaatatgtccataattatttcaaatggccacgggacaacacaatacagtacattctcctatgtggatcctgtaataacaagtatttcgccgaaatacggtcctatggctggtggcactttacttactttaactggaaattacctaaacagtgggaattctagacacatttcaattggtggaaaaacatgtactttaaaaagtgtgtcaaacagtattcttgaatgttataccccagcccaaaccatttcaactgagtttgctgttaaattgaaaattgacttagccaaccgagagacaagcatcttcagttaccgtgaagatcccattgtctatgaaattcatccaaccaaatcttttattagtacttggtggaaagaacctctcaacattgtcagttttctattttgctttgccagtggtgggagcacaataacaggtgttgggaaaaacctgaattcagttagtgtcccgagaatggtcataaatgtgcatgaagcaggaaggaactttacagtggcatgtcaacatcgctctaattcagagataatctgttgtaccactccttccctgcaacagctgaatctgcaactccccctgaaaaccaaagcctttttcatgttagatgggatcctttccaaatactttgatctcatttatgtacataatcctgtgtttaagccttttgaaaagccagtgatgatctcaatgggcaatgaaaatgtactggaaattaagggaaatgatattgaccctgaagcagttaaaggtgaagtgttaaaagttggaaataagagctgtgagaatatacacttacattctgaagccgttttatgcacggtccccaatgacctgctgaaattgaacagcgagctaaatatagagtggaagcaagcaatttcttcaaccgtccttggaaaagtaatagttcaaccagatcagaatttcacaggattgattgctggtgttgtctcaatatcaacagcactgttattactacttgggtttttcctgtggctgaaaaagagaaagcaaattaaagatctgggcagtgaattagttcgctacgatgcaagagtacacactcctcatttggataggcttgtaagtgcccgaagtgtaagcccaactacagaaatggtttcaaatgaatctgtagactaccgagctacttttccagaagatcagtttcctaattcatctcagaacggttcatgccgacaagtgcagtatcctctgacagacatgtcccccatcctaactagtggggactctgatatatccagtccattactgcaaaatactgtccacattgacctcagtgctctaaatccagagctggtccaggcagtgcagcatgtagtgattgggcccagtagcctgattgtgcatttcaatgaagtcataggaagagggcattttggttgtgtatatcatgggactttgttggacaatgatggcaagaaaattcactgtgctgtgaaatccttgaacagaatcactgacataggagaagtttcccaatttctgaccgagggaatcatcatgaaagattttagtcatcccaatgtcctctcgctcctgggaatctgcctgcgaagtgaagggtctccgctggtggtcctaccatacatgaaacatggagatcttcgaaatttcattcgaaatgagactcataatccaactgtaaaagatcttattggctttggtcttcaagtagccaaagcgatgaaatatcttgcaagcaaaaagtttgtccacagagacttggctgcaagaaactgtatgctggatgaaaaattcacagtcaaggttgctgattttggtcttgccagagacatgtatgataaagaatactatagtgtacacaacaaaacaggtgcaaagctgccagtgaagtggatggctttggaaagtctgcaaactcaaaagtttaccaccaagtcagatgtgtggtcctttggcgtcgtcctctgggagctgatgacaagaggagccccaccttatcctgacgtaaacacctttgatataactgtttacttgttgcaagggagaagactcctacaacccgaatactgcccagaccccttatatgaagtaatgctaaaatgctggcaccctaaagccgaaatgcgcccatccttttctgaactggtgtcccggatatcagcgatcttctctactttcattggggagcactatgtccatgtgaacgctacttatgtgaacgtaaaatgtgtcgctccgtatccttctctgttgtcatcagaagataacgctgatgatgaggtggacacacgaccagcctccttctgggagacatcatagtgctagtactatgtcaaagcaacagtccacactttgtccaatggttttttcactgcctgacctttaaaaggccatcgatattctttgctccttgccataggacttgtattgttatttaaattactggattctaaggaatttcttatctgacagagcatcagaaccagaggcttggtcccacaggccagggaccaatgcgctgcag

SEQ ID NO: 90 - DNA, 927 bp, Homo sapiens
ggaagtttaggttaactgtcttaaatttccaaagctgtaatcattattttcattctcaaagtgatggccttgtgttttgctcctctcctccagggccagactgagcccaggttgatttcaggcggacaccaatagactccacagcagctccaggagcccagacaccggcggccagaagcaaggctaggagctgctgcagccatgtcggccctcagcctcctcattctgggcctgctcacggcagtgccacctgccagctgtcagcaaggcctggggaaccttcagccctggatgcagggccttatcgcggtggccgtgttcctggtcctcgttgcaatcgcctttgcagtcaaccacttctggtgccaggaggagccggagcctgcacacatgatcctgaccgtcggaaacaaggcagatggagtcctggtgggaacagatggaaggtactcttcgatggcggccagtttcaggtccagtgagcatgagaatgcctatgagaatgtgcccgaggaggaaggcaaggtccgcagcaccccgatgtaaccttctctgtggctccaaccccaagactcccaggcacatgggatggatgtccagtgctaccacccaagccccctccttctttgtgtggaatctgcaatagtgggctgactccctccagccccatgccggccctacccgcccttgaagtatagccagccaaggttggagctcagaccgtgtctaggttggggctcggctgtggccctggggtctcctgctcagctcagaagagccttctggagaggacagtcagctgagcacctcccatcctgctcacacgtccttccccataactatggaaatggccctaatttctgtgaaataaagactttttgtatttctggggctgaggctcagcaacagcccctcaggcttccaaaa

SEQ ID NO: 91 - DNA, 1712 bp, Homo sapiens
ggcacgaggggcagctgtcggctggaaggaactggtctgctcacacttgctggcttgcgcatcaggactggctttatctcctgactcacggtgcaaaggtgcactctgcgaacgttaagtccgtccccagcgcttggaatcctacggcccccacagccggatcccctcagccttccaggtcctcaactcccgcggacgctgaacaatggcctccatggggctacaggtaatgggcatcgcgctggccgtcctgggctggctggccgtcatgctgtgctgcgcgctgcccatgtggcgcgtgacggccttcatcggcagcaacattgtcacctcgcagaccatctgggagggcctatggatgaactgcgtggtgcagagcaccggccagatgcagtgcaaggtgtacgactcgctgctggcactgccgcaggacctgcaggcggcccgcgccctcgtcatcatcagcatcatcgtggctgctctgggcgtgctgctgtccgtggtggggggcaagtgtaccaactgcctggaggatgaaagcgccaaggccaagaccatgatcgtggcgggcgtggtgttcctgttggccggccttatggtgatagtgccggtgtcctggacggcccacaacatcatccaagacttctacaatccgctggtggcctccgggcagaagcgggagatgggtgcctcgctctacgtcggctgggccgcctccggcctgctgctccttggcggggggctgctttgctgcaactgtccaccccgcacagacaagccttactccgccaagtattctgctgcccgctctgctgctgccagcaactacgtgtaaggtgccacggctccactctgttcctctctgctttgttcttccctggactgagctcagcgcaggctgtgaccccaggagggccctgccacgggccactggctgctggggactggggactgggcagagactgagccaggcaggaaggcagcagccttcagcctctctggcccactcggacaacttcccaaggccgcctcctgctagcaagaacagagtccaccctcctctggatattggggagggacggaagtgacagggtgtggtggtggagtggggagctggcttctgctggccaggatggcttaaccctgactttgggatctgcctgcatcggtgttggccactgtccccatttacattttccccactctgtctgcctgcatctcctctgttgcgggtaggccttgatatcacctctgggactgtgccttgctcaccgaaacccgcgcccaggagtatggctgaggccttgcccacccacctgcctgggaagtgcagagtggatggacgggtttagaggggaggggcgaaggtgctgtaaacaggtttgggcagtggtgggggagggggccagagaggcggctcaggttgcccagctctgtggcctcaggactctctgcctcacccgcttcagcccagggcccctggagactgatcccctctgagtcctctgccccttccaaggacactaatgagcctgggagggtggcagggaggaggggacagcttcacccttggaagtcctggggtttttcctcttccttctttgtggtttctgttttgtaatttaagaagagctattcatcactgtaattattattattttctacaataaatgggacctgtgcacaggaaaaaaaaaaaaaaaaaaaaaaaa

SEQ ID NO: 92 - DNA, 1493 bp, Homo sapiens
tgagcgggggatgatggcgccgcggagggtcaggtcgtttctgcgcgggctcccggcgctgctactgctgctgctcttcctcgggccctggcccgctgcgagccacggcggcaagtactcgcgggagaagaaccagcccaagccgtccccgaaacgcgagtccggagaggagttccgcatggagaagttgaaccagctgtgggagaaggcccagcgactgcatcttcctcccgtgaggctggccgagctccacgctgatctgaagatacaggagagggacgaactcgcctggaagaaactaaagcttgacggcttggacgaagatggggagaaggaagcgagactcatacgcaacctcaatgtcatcttggccaagtatggtctggacggaaagaaggacgctcggcaggtgaccagcaactccctcagtggcacccaggaagacgggctggatgaccccaggctggaaaagctgtggcacaaggcgaagacctctgggaaattctccggcgaagaactggacaagctctggcgggagttcctgcatcacaaagagaaagttcacgagtacaacgtcctgctggagaccctgagcaggaccgaagaaatccacgagaacgtcattagcccctcggacctgagcgacatcaagggcagcgtcctgcacagcaggcacacggagctgaaggagaagctgcgcagcatcaaccagggcctggaccgcctgcgcagggtcagccaccagggctacagcactgaggctgagttcgaggagcccagggtgattgacctgtgggacctggcgcagtccgccaacctcacggacaaggagctggaggcgttccgggaggagctcaagcacttcgaagccaaaatcgagaagcacaaccactaccagaagcagctggagattgcgcacgagaagctgaggcacgcagagagcgtgggcgacggcgagcgtgtgagccgcagccgcgagaagcacgccctgctggaggggcggaccaaggagctgggctacacggtgaagaagcatctgcaggacctgtccggcaggatctccagagctcggcacaacgaactctgaaggcactggggagcccagcccggcagggaagaggccagcgtgaaggacctgggctcttggccgtggcatttccgtggacagcccgccgtcagggtggctggggctggcacgggtgtcgaggcaggaaggattgtttctggtgactgcagccgctgccgtcgcgacacagggcttggtggtggtagcatttgggtctgagatcggcccagctctgactgaaggggcttggcttccactcagcatcagcgtggcagtcaccaccccagtgaggacctcgatgtccagctgctgtcaggtctgatagtcctctgctaaaacaacacgatttacataaaaaatcttacacatctgccaccggaaataccatgcacagagtccttaaaaaatagagtgcagtatttaaacc

SEQ ID NO: 93 - DNA, 3178 bp, Homo sapiens
ggcaccgattcggggcctgcccggacttcgccgcacgctgcagaacctcgcccagcgcccaccatgccccggcagctcagcgcggcggccgcgctcttcgcgtccctggccgtaattttgcacgatggcagtcaaatgagagcaaaagcatttccagaaaccagagattattctcaacctactgcagcagcaacagtacaggacataaaaaaacctgtccagcaaccagctaagcaagcacctcaccaaactttagcagcaagattcatggatggtcatatcacctttcaaacagcggccacagtaaaaattccaacaactaccccagcaactacaaaaaacactgcaaccaccagcccaattacctacaccctggtcacaacccaggccacacccaacaactcacacacagctcctccagttactgaagttacagtcggccctagcttagccccttattcactgccacccaccatcaccccaccagctcatacagctggaaccagttcatcaaccgtcagccacacaactgggaacaccactcaacccagtaaccagaccacccttccagcaactttatcgatagcactgcacaaaagcacaaccggtcagaagcctgatcaacccacccatgccccaggaacaacggcagctgcccacaataccacccgcacagctgcacctgcctccacggttcctgggcccacccttgcacctcagccatcgtcagtcaagactggaatttatcaggttctaaacggaagcagactctgtataaaagcagagatggggatacagctgattgttcaagacaaggagtcggttttttcacctcggagatacttcaacatcgaccccaacgcaacgcaagcctctgggaactgtggcacccgaaaatccaaccttctgttgaattttcagggcggatttgtgaatctcacatttaccaaggatgaagaatcatattatatcagtgaagtgggagcctatttgaccgtctcagatccagagacagtttaccaaggaatcaaacatgcggtggtgatgttccagacagcagtcgggcattccttcaagtgcgtgagtgaacagagcctccagttgtcagcccacctgcaggtgaaaacaaccgatgtccaacttcaagcctttgattttgaagatgaccactttggaaatgtggatgagtgctcgtctgactacacaattgtgcttcctgtgattggggccatcgtggttggtctctgccttatgggtatgggtgtctataaaatccgcctaaggtgtcaatcatctggataccagagaatctaattgttgcccggggggaatgaaaataatggaatttagagaactctttcatcccttccaggatggatgttgggaaattccctcagagtgtgggtccttcaaacaatgtaaaccaccatcttctattcaaatgaagtgagtcatgtgtgatttaagttcaggcagcacatcaatttctaaatactttttgtttattttatgaaagatatagtgagctgtttattttctagtttcctttagaatattttagccactcaaagtcaacatttgagatatgttgaattaacataatatatgtaaagtagaataagccttcaaattataaaccaagggtcaattgtaactaatactactgtgtgtgcattgaagattttattttacccttgatcttaacaaagcctttgctttgttatcaaatggactttcagtgcttttactatctgtgttttatggtttcatgtaacatacatattcctggtgtagcacttaactccttttccactttaaatttgtttttgttttttgagacggagtttcactcttgtcacccaggctggagtacagtggcacgatctcggcttatggcaacctccgcctcccgggttcaagtgattctcctgcttcagcttcccgagtagctgggattacaggcacacactaccacgcctggctaatttttgtatttttattatagacgggtttcaccatgttggccagactggtcttgaactcttgacctcaggtgatccacccacctcagcctcccaaagtgctgggattacaggcatgagccattgcgcccggccttaaatgttttttttaatcatcaaaaagaacaacatatctcaggttgtctaagtgtttttatgtaaaaccaacaaaaagaacaaatcagcttatattttttatcttgatgactcctgctccagaattgctagactaagaattaggtggctacagatggtagaactaaacaataagcaagagacaataataatggcccttaattattaacaaagtgccagagtctaggctaagcactttatctatatctcatttcattctcacaacttataagtgaatgagtaaactgagacttaagggaactgaatcacttaaatgtcacctggctaactgatggcagagccagagcttgaattcatgttggtctgacatcaaggtctttggtcttctccctacaccaagttacctacaagaacaatgacaccacactctgcctgaaggctcacacctcataccagcatacgctcaccttacagggaaatgggtttatccaggatcatgagacattagggtagatgaaaggagagctttgcagataacaaaatagcctatccttaataaatcctccactctctggaaggagactgaggggctttgtaaaacattagtcagttgctcatttttatgggattgcttagctgggctgtaaagatgaaggcatcaaataaactcaaagtatttttaaatttttttgataatagagaaacttcgctaaccaactgttctttcttgagtgtatagccccatcttgtggtaacttgctgcttctgcacttcatatccatatttcctattgttcactttattctgtagagcagcctgccaagaattttatttctgctgttttttttgctgctaaagaaaggaactaagtcaggatgttaacagaaaagtccacataaccctagaattcttagtcaaggaataattcaagtcagcctagagaccatgttgactttcctcatgtgtttccttatgactcagtaagttggcaaggtcctgactttagtcttaataaaacattgaattgtagtaaaggtttttgcaataaaaacttactttgg

SEQ ID NO: 94 - DNA, 1364 bp, Homo sapiens
aggggactggggccaagagccgggagcgcgggcgcaaaggcaccagggcccgcccagggcgccgcgcagcacggccttgggggttctgcgggccttcgggtgcgcgtctcgcctctagccatggggtccgcagcgttggagatcctgggcctggtgctgtgcctggtgggctgggggggtctgatcctggcgtgcgggctgcccatgtggcaggtgaccgccttcctggaccacaacatcgtgacggcgcagaccacctggaagggcctgtggatgtcgtgcgtggtgcagagcaccgggcacatgcagtgcaaagtgtacgactcggtgctggctctgagcaccgaggtgcaggcggcgcgggcgctcaccgtgagcgccgtgctgctggcgttcgttgcgctcttcgtgaccctggcgggcgcgcagtgcaccacctgcgtggccccgggcccggccaaggcgcgtgtggccctcacgggaggcgtgctctacctgttttgcgggctgctggcgctcgtgccactctgctggttcgccaacattgtcgtccgcgagttttacgacccgtctgtgcccgtgtcgcagaagtacgagctgggcgcagcgctgtacatcggctgggcggccaccgcgctgctcatggtaggcggctgcctcttgtgctgcggcgcctgggtctgcaccggccgtcccgacctcagcttccccgtgaagtactcagcgccgcggcggcccacggccaccggcgactacgacaagaagaactacgtctgagggcgctgggcacggccgggcccctcctgccagccacgcctgcgaggcgttggataagcctggggagccccgcatggaccgcggcttccgccgggtagcgcggcgcgcaggctcctcggaacgtccggctctgcgccccgacgcggctcctggatccgctcctgcctgcgcccgcagctgaccttctcctgccactagcccggccctgcccttaacagacggaatgaagtttccttttctgtgcgcggcgctgtttccataggcagagcgggtgtcagactgaggatttcgcttcccctccaagacgctgggggtcttggctgctgccttacttcccagaggctcctgctgacttcggaggggcggatgcagagcccggggcccccaccggaagatgtgtacagctggtctttactccatcggcaggcccgagcccagggaccagtgacttggcctggacctcccggtctcactccagcatctccccaggcaaggcttgtgggcaccggagcttgagagagggcgggagtgggaaggctaagaatctgcttagtaaatggtttgaactctcaaaaaaaaaaaaaaaa

SEQ ID NO: 95 - DNA, 983 bp, Homo sapiens
gtggaattcatggcatctacttcgtatgactattgcagagtgcccatggaagacggggataagcgctgtaagcttctgctggggataggaattctggtgctcctgatcatcgtgattctgggggtgcccttgattatcttcaccatcaaggccaacagcgaggcctgccgggacggccttcgggcagtgatggagtgtcgcaatgtcacccatctcctgcaacaagagctgaccgaggcccagaagggctttcaggatgtggaggcccaggccgccacctgcaaccacactgtgatggccctaatggcttccctggatgcagagaaggcccaaggacaaaagaaagtggaggagcttgagggagagatcactacattaaaccataagcttcaggacgcgtctgcagaggtggagcgactgagaagagaaaaccaggtcttaagcgtgagaatcgcggacaagaagtactaccccagctcccaggactccagctccgctgcggcgccccagctgctgattgtgctgctgggcctcagcgctctgctgcagtgagatcccaggaagctggcacatcttggaaggtccgtcctgctcggcttttcgcttgaacattcccttgatctcatcagttctgagcgggtcatggggcaacacggttagcggggagagcacggggtagccggagaagggcctctggagcaggtctggaggggccatggggcagtcctgggtgtggggacacagtcgggttgacccagggctgtctccctccagagcctccctccggacaatgagtcccccctcttgtctcccaccctgagattgggcatggggtgcggtgtggggggcatgtgctgcctgttgttatgggttttttttgcggggggggttgcttttttctggggtctttgagctccaaaaaataaacacttcctttgagggagagcaaaaaaaaaaaaaaaaaaaaaaaaaaaaaaaaaaaa

SEQ ID NO: 96 - DNA, 2102 bp, Homo sapiens
ccgctgggcgtagctgcgactcggcggagtcccggcggcgcgtccttgttctaacccggcgcgccatgaccgtcgcgcggccgagcgtgcccgcggcgctgcccctcctcggggagctgccccggctgctgctgctggtgctgttgtgcctgccggccgtgtggggtgactgtggccttcccccagatgtacctaatgcccagccagctttggaaggccgtacaagttttcccgaggatactgtaataacgtacaaatgtgaagaaagctttgtgaaaattcctggcgagaaggactcagtgatctgccttaagggcagtcaatggtcagatattgaagagttctgcaatcgtagctgcgaggtgccaacaaggctaaattctgcatccctcaaacagccttatatcactcagaattattttccagtcggtactgttgtggaatatgagtgccgtccaggttacagaagagaaccttctctatcaccaaaactaacttgccttcagaatttaaaatggtccacagcagtcgaattttgtaaaaagaaatcatgccctaatccgggagaaatacgaaatggtcagattgatgtaccaggtggcatattatttggtgcaaccatctccttctcatgtaacacagggtacaaattatttggctcgacttctagtttttgtcttatttcaggcagctctgtccagtggagtgacccgttgccagagtgcagagaaatttattgtccagcaccaccacaaattgacaatggaataattcaaggggaacgtgaccattatggatatagacagtctgtaacgtatgcatgtaataaaggattcaccatgattggagagcactctatttattgtactgtgaataatgatgaaggagagtggagtggcccaccacctgaatgcagaggaaaatctctaacttccaaggtcccaccaacagttcagaaacctaccacagtaaatgttccaactacagaagtctcaccaacttctcagaaaaccaccacaaaaaccaccacaccaaatgctcaagcaacacggagtacacctgtttccaggacaaccaagcattttcatgaaacaaccccaaataaaggaagtggaaccacttcaggtactacccgtcttctatctgggcacacgtgtttcacgttgacaggtttgcttgggacgctagtaaccatgggcttgctgacttagccaaagaagagttaagaagaaaatacacacaagtatacagactgttcctagtttcttagacttatctgcatattggataaaataaatgcaattgtgctcttcatttaggatgctttcattgtctttaagatgtgttaggaatgtcaacagagcaaggagaaaaaaggcagtcctggaatcacattcttagcacacctacacctcttgaaaatagaacaacttgcagaattgagagtgattcctttcctaaaagtgtaagaaagcatagagatttgttcgtatttagaatgggatcacgaggaaaagagaaggaaagtgatttttttccacaagatctgtaatgttatttccacttataaaggaaataaaaaatgaaaaacattatttggatatcaaaagcaaataaaaacccaattcagtctcttctaagcaaaattgctaaagagagatgaaccacattataaagtaatctttggctgtaaggcattttcatctttccttcgggttggcaaaatattttaaaggtaaaacatgctggtgaaccaggggtgttgatggtgataagggaggaatatagaatgaaagactgaatcttcctttgttgcacaaatagagtttggaaaaagcctgtgaaaggtgtcttctttgacttaatgtctttaaaagtatccagagatactacaatattaacataagaaaagattatatattatttctgaatcgagatgtccatagtcaaatttgtaaatcttattcttttgtaatatttatttatatttatttatgacagtgaacattctgattttacatgtaaaacaagaaaagttgaagaagatatgtgaagaaaaatgtatttttcctaaatagaaataaatgatcccattttttggt

SEQ ID NO: 97 - DNA, 2000 bp, Homo sapiens
attttcctggggctccggggcgcggagaagctgcatcccagaggagcgcgtccaggagcggacccgggagtgtttcaagagccagtgacaaggaccaggggcccaagtcccaccagccatgcagacctgccccctggcattccctggccacgtttcccaggcccttgggaccctcctgtttttggctgcctccttgagtgctcagaatgaaggctgggacagccccatctgcacagagggggtagtctctgtgtcttggggcgagaacaccgtcatgtcctgcaacatctccaacgccttctcccatgtcaacatcaagctgcgtgcccacgggcaggagagcgccatcttcaatgaggtggctccaggctacttctcccgggacggctggcagctccaggttcagggaggcgtggcacagctggtgatcaaaggcgcccgggactcccatgctgggctgtacatgtggcacctcgtgggacaccagagaaataacagacaagtcacgctggaggtttcaggtgcagaaccccagtccgcccctgacactgggttctggcctgtgccagcggtggtcactgctgtcttcatcctcttggtcgctctggtcatgttcgcctggtacaggtgccgctgttcccagcaacgccgggagaagaagttcttcctcctagaaccccagatgaaggtcgcagccctcagagcgggagcccagcagggcctgagcagagcctccgctgaactgtggaccccagactccgagcccaccccaaggccgctggcactggtgttcaaaccctcaccacttggagccctggagctgctgtccccccaacccttgtttccatatgccgcagacccatagccgcctgcaaggcagagaggacacaggagagccagccctgagtgccgaccttgggtggcggggcctgggtctctcgtcccacccggagggcacagacaccggcttgcttggcaggctgggcctctgtgtcacccactcctgggtgcgtgcagacccttcccctccaccccccaggtcttccaagctctgcttcctcagtttccaaaatggaaccacctcacctccgcagcacccgacttaccaggacgcatgcccctccctctgccctcatcaaacccacagacccggactccctttctgccaccccaggctggtccggccccaggtgtggggtccgctctctccactcccagggctccgcgcccaagtgagggggcccctgccggagcctcagacacactggagttcagggctgggggggccttggcacatacctgtcccttggctatgagcaggctttgggggcccttccgcggcagccccgggggccgaggtagggtctgggggcttagaggctgggatggctcctggccccaccgccagggggcaagcgcaggccgggctgggaggcggcggcggcggctcgggctggggggtcaggtggacgctgcctccggggctggtcgcgcatccctcagtccctcggccacccgggggtcgctccctcgtgcccaccgcacctgccgagcctctttggacccagatctgttcatgcttttgtcttcgtcactgcggcggggccctttgatgtcttcatctgtatggggtggaaaaatcaccgggaatcccccttcagttctttgaaaaagttccatgactcgaatatctgaaatgaagaaaacaaaccgactcacaaacctccaagtagctccaaatgcaatttttaaaatggaaaacaaaaatctgaaagaaacgtctttagtggctttaagccccaaaacgtccctaaggcgtcctcgagatgaagacgggggggagcccccagccaggtggagaccccgcaggacgcggcggcgcccggtgaccgaggcctcgcacagccggccgccctgagggtcgggccggagccagggtccaagaggggcgcgtttgtgtctcgggttaaaataaggttccgtccgcgtgctgggtcaga

SEQ ID NO: 98 - DNA, 1360 bp, Homo sapiens
cagcctcgcaatgagctgccacaactgctccgacccccaggtcctttgcagctccgggcagctgttcctgcagcccctctgggaccacctgaggagctgggaggccctcctacagtcgcccttcttcccggtcatcttctccatcaccacatacgtgggcttttgcctgcccttcgtggtcctggatatcctgtgctcctgggtgcccgccctgcggcgctacaagatccaccctgacttctcgccatccgcgcagcagctgctaccttgcctggggcagaccctctaccagcatgtgatgtttgtgttccccgtgacgctgctgcattgggcccgcagcccggccctcctgccccacgaagctcccgagctgctcctgctgctgcaccacatcctgttctgcctgctactcttcgacatggagttcttcgtgtggcacctgctgcaccacaaggtgccctggctgtaccgcaccttccacaaggtgcaccaccagaactcgtcctcgttcgcgctggcaacgcagtatatgagcgtctgggaactgttttctttgggcttcttcgacatgatgaacgtcacactgctcgggtgccacccgctcaccaccctgaccttccacgtggtcaacatctggctttccgtggaggaccactccggctacaacttcccttggtccactcacagactggtgcccttcgggtggtacgggggtgtggtgcaccacgacctgcatcactctcactttaactgcaacttcgctccgtactttacacactgggacaaaatactgggaacgctgcggactgcatctgtcccagcgcggtgatgtggctgcggtgggtgcccctaagactcgggactgctgtgcctttcacacttgaatgaagagaaacacctgagctatatatttttttaaagcaactaacttattgctttatgtttatctatgaaaaccatagataaaatctgatgcatttttgtaatctgacaaagtaatttacatactgtttgtgtatcaatacaattttgtgttcttggtattcttagtctagctcacctcaatagccttgaatcctgcatatgaattagacattcatcactggcatatttagaatatctctaaaaggacttgtttgtagaataaggaattttctatgtttcaaagtgttctaaaacctggctaaaagaatgtatttttgtggatggtgttgacttctgactctaaaagcaatcaaacatgtttctgctggacagtgaccaagaattatagtaccttcttatatttttttatagaactgtatatttattttgaaagaaatgttattcgtgctttaaaaaggaaaaaaaaccataaaaa

SEQ ID NO: 99 - DNA, 2671 bp, Homo sapiens
aagatgggtctctaccgcatccgcgtgtccactggggcctcgctctatgccggttccaacaaccaggtgcagctgtggctggtcggccagcacggggaggcggcgctcgggaagcgactgtggcccgcacggggcaaggagacagaactcaaggtggaagtaccggagtatctggggccgctgctgtttgtgaaactgcgcaaacggcacctccttaaggacgacgcctggttctgcaactggatctctgtgcagggccccggagccggggacgaggtcaggttcccttgttaccgctgggtggagggcaacggcgtcctgagcctgcctgaaggcaccggccgcactgtgggcgaggaccctcagggcctgttccagaaacaccgggaagaagagctggaagagagaaggaagttgtaccggtggggaaactggaaggacgggttaattctgaatatggctggggccaaactatatgacctccctgtggatgagcgatttctggaagacaagagagttgactttgaggtttcgctggccaaggggctggccgacctcgctatcaaagactctctaaatgttctgacttgctggaaggatctagatgacttcaaccggattttctggtgtggtcagagcaagctggctgagcgcgtgcgggactcctggaaggaagatgccttatttgggtaccagtttcttaatggcgccaaccccgtggtgctgaggcgctctgctcaccttcctgctcgcctagtgttccctccaggcatggaggaactgcaggcccagctggagaaggagctggagggaggcacactgttcgaagctgacttctccctgctggatgggatcaaggccaacgtcattctctgtagccagcagcacctggctgcccctctagtcatgctgaaattgcagcctgatgggaaactcttgcccatggtcatccagctccagctgccccgcacaggatccccaccacctccccttttcttgcctacggatcccccaatggcctggcttctggccaaatgctgggtgcgcagctctgacttccagctccatgagctgcagtctcatcttctgaggggacacttgatggctgaggtcattgttgtggccaccatgaggtgcctgccgtcgatacatcctatcttcaagcttataattccccacctgcgatacaccctggaaattaacgtccgggccaggactgggctggtctctgacatgggaattttcgaccagataatgagcactggtgggggaggccacgtgcagctgctcaagcaagctggagccttcctaacctacagctccttctgtccccctgatgacttggccgaccgggggctcctgggagtgaagtcttccttctatgcccaagatgcgctgcggctctgggaaatcatctatcggtatgtggaaggaatcgtgagtctccactataagacagacgtggctgtgaaagacgacccagagctgcagacctggtgtcgagagatcactgaaatcgggctgcaaggggcccaggaccgagggtttcctgtctctttacaggctcgggaccaggtttgccactttgtcaccatgtgtatcttcacctgcaccggccaacacgcctctgtgcacctgggccagctggactggtactcttgggtgcctaatgcaccctgcacgatgcggctgcccccgccaaccaccaaggatgcaacgctggagacagtgatggcgacactgcccaacttccaccaggcttctctccagatgtccatcacttggcagctgggcagacgccagcccgttatggtggctgtgggccagcatgaggaggagtatttttcgggccctgagcctaaggctgtgctgaagaagttcagggaggagctggctgccctggataaggaaattgagatccggaatgcaaagctggacatgccctacgagtacctgcggcccagcgtggtggaaaacagtgtggccatctaagcgtcgccaccctttggttatttcagcccccatcacccaagccacaagctgaccccttcgtggttatagccctgccctcccaagtcccaccctcttcccatgtcccaccctccctagaggggcaccttttcatggtctctgcacccagtgaacacattttactctagaggcatcacctgggaccttactcctctttccttccttcctcctttcctatcttccttcctctctctcttcctctttcttcattcagatctatatggcaaatagccacaattatataaatcatttcaagactagaatagggggatataatacatattactccacaccttttatgaatcaaatatgatttttttgttgttgttaagacagagtctcactttgacacccaggctggagtgcagtggtgccatcaccacggctcactgcagcctcagcgtcctgggctcaaatgatcctcccacctcagcctcctgagtagctgggactacaggctcatgccatcatgcccagctaatatttttttattttcgtggagacggggcctcactatgttgcctaggctggaaataggattttgaacccaaattgagtttaacaataataaaaagttgttttacgctaaagatggaaaagaactaggactgaactattttaaataaaatattggcaaaag

SEQ ID NO: 100 - DNA, 2906 bp, Homo sapiens
cggtggtatcggcggcagctgtgagggggttccgggaagatggtgctgatcaaggaattccgtgtggttttgccatgttctgttcaggagtatcaggttgggcagctttactctgttgcagaagctagtaagaatgagactggtggtggagaaggaattgaagtcttaaagaatgaaccttatgagaaggatggagaaaagggacagtatacgcacaaaatttatcacctaaagagcaaagtgcctgcattcgtgaggatgattgctcccgagggctccttggtgtttcatgagaaagcctggaatgcgtacccctactgtagaacaattgtaacgaatgaatatatgaaagatgatttcttcattaaaatcgaaacatggcacaaaccagacttgggaacattagaaaatgtacatggtttagatccaaacacatggaaaactgttgaaattgtccatatagatattgcagatagaagtcaagttgaaccagcagactacaaagctgatgaagacccagcattattccagtcagtcaagaccaagagaggccctttgggacccaactggaagaaggagctggcaaacagccctgactgtccccagatgtgtgcctataagctggtgaccatcaaattcaagtggtggggactgcaaagcaaagtagaaaacttcattcaaaagcaagaaaaacggatatttacaaacttccatcgccagcttttttgttggattgacaagtggatcgatctcacgatggaagacattaggagaatggaagacgagactcagaaagaactagaaacaatgcgtaagaggggttccgttcgaggcacgtcggctgctgatgtctagatgagtcccctgtagggtcagagacaatgtcaaactgtttacgtaatcaaggtcaagtgaggggaacaagcgcagccagtgatgagtgaagaagaatctgaccagtatcttgcagtgttgacgtttcccagatgtgtgcttgtgatgatacacacacatgcacaggttctcaaccacgtgtgtatatatgtatgtgtgcatatgtctgtagctgtatataaagcgcatgtagagctacagatccagatacacacacttgtgtatatatgtacatacagacatactgaagggattagtacaatttctccaaagtactgtacctatcttcagcaagaatgcaaaagaaaatattttcaatatatatacctggaacagattttaataattatcagagtaataccattaatggacaaattgactgcaatgtaatactagctggtatgtttcataaatgtcaagctgtggaccaacatatatagccttttattatttttctcttcttttaagtcagtctgttataaatttttttttagtcccataagcagtagactcccacagaaaatttcttcaaaattttttggtgttccaatgaatctgggatgtaaactctgaatgtatttataactatttatttctggatggtcattatcttgtagccaaatttgacaatataaagtaaggagcaaagttacaggccagtttttacttgtttgccctgagggaaaaatccttttaaaaaaaatttctggtttttattggatttttgtattttaaatttcaaatatttttctacatcaaacctagcaaaaatggagatgacggtttctgatttataataaatactagacagttttcaggctcctgttagacaaacacattgatgaagaaattagtcttaataggattgtaggctgtgtagaaaagttggaaatatagcacttcatggagtcttgttttgaagatgacagttttctgtaactacagcttggaaactatgcaaatggtctagattcctcagagctcacatgataggatatagttagtgatgacattttgctcttcttgtgggaacacacacttcaaggaggagatagtgactttgagataggaacagtttaagatgcagtgtgagtctggcctgcgtgcggtgaggaggccccgccaagagactggtggacatctgactgtgggatgtgctctcaagtaggacgtcatcaggacagattctgaataggcatcatgagagtgctggtcagaaacggctgccactttttttaatttaattttattttttatttaaaggaaggaacaatagctaggtaagatttttatcagctttctctgtctgaatccagtttttcctctgtcagtcctggaagcttgaatagaattatattgttgaagccttcaggtcacaaactgtcttttgtaacctcctgtccctcctaaaacacgccaacccctgcagtcaaatcacattagtaatctgatttgctgacagtcctgccctgcctgctcctcgttttcccacatgtcctgcatccctcccccactggagtgatttcagtgaatcagacaaggaaggatgtgtaggatcactactgcattgcaataccctgttatcctcagcaacaaaacccacatttcatacatcctttgtgtactcaggataaagactgatgtttactctctgggcactgttgtaagataggttttgtcagagcataatcattgtctgcaaagtgtttggtgcgaggaagattattgctaattttgtgaaataaagagtctagccctctccttttaatgaacttaactctcgctggcatctgtagtatcattgggagcttaggcgcacatggaaatgagagcccggcgcatggattttaatgtttttctaacaactgtggagatttgagggaatgtgtggtgaatgtaaaatacctagtttacttgccagtctcttgtgtaaattacagtaaaacaaagtaaatgaaatttaaacaaaaaataaatttgatcacaaaatgaaaaaaaaaaaaaaaaaaaaa

SEQ ID NO: 101 - DNA, 1263 bp, Homo sapiens
ggactatgggggaactgatggcgttcctgttacctctcatcattgtgttaatggtgaagcacagcgattcccggacgcactctctgagatattttcgcctgggcgtttcggatcccatccatggggtccctgaatttatttcggttgggtacgtggactcgcaccctatcaccacatatgacagtgtcactcggcagaaggagccacgggccccatggatggcagagaacctcgcgcctgatcactgggagaggtacactcagctgctgaggggctggcagcagatgttcaaggtggaactgaagcgcctacagaggcactacaatcactcagggtctcacacttaccagagaatgattggctgtgagctgctggaggatggaagcaccacaggatttctgcagtatgcatatgacgggcaggatttcctgatcttcaataaagacaccctctcctggctggctgtagataatgtggctcacaccatcaagcaggcatgggaggccaatcagcatgagttgctgtatcaaaagaattggctggaagaagaatgtattgcctggctaaagagattcctggagtatgggaaagacaccctacaaagaacagagcccccactggtcagagtaaatcgcaaagaaacttttccaggggttacagctctcttctgcaaagctcatggcttttaccccccagaaatttacatgacatggatgaaaaacggggaagaaattgtccaagaaattgattatggagacattcttcccagtggggatggaacctatcaggcgtgggcatcaattgagcttgatcctcagagcagcaacctttactcctgtcatgtggagcactgcggtgtccacatggttcttcaggtcccccaggaatcagaaactatccctcttgtgatgaaagctgtctctgggtccattgtccttgtcattgtgctggctggagttggtgttctagtctggagaagaaggccccgagagcaaaatggagccatctaccttccaacaccagatcgatgattgcagatccctcttttccagttctccttcctctaggagccatgttatcctctgtcccccatagagtcaagcctagtgcttgaaggtcctgacgacacccacaacatacatgagagtaatgggattgagcatttatggcagcaacagaggagccacaaaatgttctttgttctttggctccaaaaagactgtcagctttcagtctcttttgatggactgttttatcagagtt

SEQ ID NO: 102 - DNA, 2367 bp, Homo sapiens
gggccatggggctgggccgggtcctgctgtttctggccgtcgccttcccttttgcacccccggcagccgccgctgagccccacagtcttcgttacaacctcatggtgctgtcccaggatggatctgtgcagtcagggtttctcgctgagggacatctggatggtcagcccttcctgcgctatgacaggcagaaacgcagggcaaagccccagggacagtgggcagaagatgtcctgggagctgagacctgggacacagagaccgaggacttgacagagaatgggcaagacctcaggaggaccctgactcatatcaaggaccagaaaggaggcttgcattccctccaggagattagggtctgtgagatccatgaagacagcagcaccaggggctcccggcatttctactacaatggggagctcttcctctcccaaaacctggagactcaagaatcgacagtgccccagtcctccagagctcagaccttggctatgaacgtcacaaatttctggaaggaagatgccatgaagaccaagacacactatcgcgctatgcaggcagactgcctgcagaaactacagcgatatctgaaatccggggtggccatcaggagaacagtgccccccatggtgaatgtcacctgcagcgaggtctcagagggcaacatcaccgtgacatgcagggcttccagcttctatccccggaatatcacactgacctggcgtcaggatggggtatctttgagccacaacacccagcagtggggggatgtcctgcctgatgggaatggaacctaccagacctgggtggccaccaggattcgccaaggagaggagcagaggttcacctgctacatggaacacagcgggaatcacggcactcaccctgtgccctctgggaaggcgctggtgcttcagagtcaacggacagactttccatatgtttctgctgctatgccatgttttgttattattattattctctgtgtcccttgttgcaagaagaaaacatcagcggcagagggtccagagcttgtgagcctgcaggtcctggatcaacacccagttgggacaggagaccacagggatgcagcacagctgggatttcagcctctgatgtcagctactgggtccactggttccactgagggcgcctagactctacagccaggcggccaggattcaactccctgcctggatctcaccagcactttccctctgtttcctgacctatgaaacagaaaataacatcacttatttattgttgttggatgctgcaaagtgttagtaggtatgaggtgtttgctgctctgccacgtagagagccagcaaagggatcatgaccaactcaacattccattggaggctatatgatcaaacagcaaattgtttatcatgaatgcaggatgtgggcaaactcacgactgctcctgccaacagaaggtttgctgagggcattcactccatggtgctcattggagttatctactgggtcatctagagcctattgtttgaggaatgcagtcttacaagcctactctggacccagcagctgactccttcttccacccctcttcttgctatctcctataccaataaatacgaagggctgtggaagatcagagcccttgttcacgagaagcaagaagccccctgaccccttgttccaaatatactcttttgtctttctctttattcccacgttcgccctttgttcagtccaatacagggttgtggggcccttaacagtgccatattaattggtatcattatttctgttgtttttgtttttgtttttgtttttgtttttgagacagagtctcactctgtcacccaggctgcagttcactggtgtgatctcagctcactgcaacctctgcctcccaggttcaagcacttctcgtacctcagactcccgaatagctgggattacagacaggcaccaccacacccagctaatttttgtattttttgtagagacggggtttcgccaagttgaccagcccagtttcaaactcctgacctcaggtgatctgcctgccttggcatcccaaagtgctgggattacaagaatgagccaccgtgcctggcctattttattatattgtaatatattttattatattagccaccatgcctgtcctattttcttatgttttaatatattttaatatattacatgtgcagtaattagattatcatgggtgaactttatgagtgagtatcttggtgatgactcctcctgaccagcccaggaccagctttcttgtcaccttgaggtcccctcgccccgtcacaccgttatgcattactctgtgtctactattatgtgtgcataatttataccgtaaatgtttactctttaaat

SEQ ID NO: 103 - DNA, 1188 bp, Homo sapiens
atggcgccccgaagcctcctcctgctgctctcaggggccctggccctgaccgatacttgggcgggctcccactccttgaggtatttcagcaccgctgtgtcgcggcccggccgcggggagccccgctacatcgccgtggagtacgtagacgacacgcaattcctgcggttcgacagcgacgccgcgattccgaggatggagccgcgggagccgtgggtggagcaagaggggccgcagtattgggagtggaccacagggtacgccaaggccaacgcacagactgaccgagtggccctgaggaacctgctccgccgctacaaccagagcgaggctgggtctcacaccctccagggaatgaatggctgcgacatggggcccgacggacgcctcctccgcgggtatcaccagcacgcgtacgacggcaaggattacatctccctgaacgaggacctgcgctcctggaccgcggcggacaccgtggctcagatcacccagcgcttctatgaggcagaggaatatgcagaggagttcaggacctacctggagggcgagtgcctggagttgctccgcagatacttggagaatgggaaggagacgctacagcgcgcagatcctccaaaggcacacgttgcccaccaccccatctctgaccatgaggccaccctgaggtgctgggccctgggcttctaccctgcggagatcacgctgacctggcagcgggatggggaggaacagacccaggacacagagcttgtggagaccaggcctgcaggggatggaaccttccagaagtgggccgctgtggtggtgccttctggagaggaacagagatacacatgccatgtgcagcacgaggggctgccccagcccctcatcctgagatgggagcagtctccccagcccaccatccccatcgtgggcatcgttgctggccttgttgtccttggagctgtggtcactggagctgtggtcgctgctgtgatgtggaggaagaagagctcagatagaaacagagggagctactctcaggctgcagtcactgacagtgcccagggctctggggtgtctctcacagctaataaagtgtgagacagcttccttgtgtgggactgagaagcaagatatcaatgtagcagaattgcacttgtgcctcacgaacatacataaattttaaaaataaagaataaa

SEQ ID NO: 104 - DNA, 3432 bp, Homo sapiens
  misc_feature (2741)..(2741): "n" = a, t, g, or c.
ctcgtcatgcgcaatgtggcgctgcggcgggcggcagggcctgtgtgtgctgaggcggctgagcggcggacatgcacaccacagagcgtggcgatggaacagtaaccgggcttgtgagagggctctgcagtataaactaggagacaagatccatggattcaccgtaaaccaggtgacatctgttcccgagctgttcctgactgcagtgaagctcacccatgatgacacaggagccaggtatttacacctggccagagaagacacgaataatctgttcagcgtgcagttccgtaccactcccatggacagtactggtgttcctcacattcttgagcataccgtcctttgtgggtctcaaaaatatccgtgcagaaaccctttcttcaaaatgttgaaccggtccctctccacgttcatgaacgccttcacagctagtgattatactctgtatccattttccacacaaaatcccaaggactttcagaatctcctctcggtgtatttggatgccaccttttccccatgtttacgcgagctggatttctggcaggaaggatggcggctggaacatgagaatccgagcgacccccagacgcccttggtctttaaaggagtcgtctttaatgagatgaagggagcgtttacagacaatgagaggatattctcccagcaccttcagaacagacttcttcccgaccacacgtactcagtggtctccgggggtgacccactgtgcatcccggagcttacatgggagcagcttaagcagtttcatgccactcactatcacccaagcaatgctaggttcttcacgtacggtaattttccattagaacagcatctgaaacaaattcacgaggaagcactgagcaaattccagaaaattgaaccaagcaccgtggtgccagctcagacaccctgggacaagcctagggaattccagataacatgtggcccggattcatttgctacagatccctctaaacaaacaaccgtcagcgttagcttcctcttaccggacatcaccgacacatttgaagccttcacattaagtcttctgtcttcactcttgacttctgggcccaattctcccttttacaaagccttgattgaatctggccttggcacagaattttctcctgatgttggatataatggctacacgagggaggcctactttagtgtcggcctccaagggattgtggagaaagacattgagaccgtcagaagcctcatagacagaacgattgatgaagtagttgagacaaggattgaagatgatcgaattgaggctttacttcataaaattgaaatacagatgaaacatcagtctaccagctttgggctgatgctgacatcatacatagcttcttgctggaaccatgatggggaccctgtggagctcttgaagttgggaaatcagttagctaaattcagacagtgcctgcaggaaaatccaaaatttttgcaagaaaaagtaaaacagtattttaagaataaccagcataagctgactttatcgatgaggccagatgacaagtatcacgagaagcaggcacaggtggaagccacgaagctcaagcagaaggtcgaggctctgtcccccggagacaggcagcagatctacgagaaaggtctagaattacggagtcaacaaagcaaacctcaagatgcctcttgtctgccagcgttgaaagtttccgatattgaacccaccatacctgtcacagagttggacgtggtcctgacagctggagatatccctgttcagtactgcgcccagcccaccaatggcatggtgtatttccgggccttctccagcctgaacacactccccgaggagctgaggccctatgtgcccctcttctgcagcatcctcaccaagctgggctgcggccttcttgactaccgggagcaggctcagcagatagaattgaagaccggagggatgagtgcttctccccacgtgctccccgacgactcacacatggacacctacgagcaggtaggtgtgcttttctcctctctctgcctggatcgaaacctgccagacatgatgcagctatggagtgaaatatttaacaacccgtgctttgaagaagaggagcacttcaaggtgctggtgaagatgaccgcccaggagctcgccaatggaattcctgactctgggcacctgtacgcatccatcagggcaggccggaccctcacgcccgcaggggacctgcaggagaccttcagcgggatggatcaggtgcggctgatgaagaggattgcagaaatgacagatatcaaacccatcctgaggaagctcccgcgtatcaagaaacacttgttaaatggtgataatatgaggtgttcagtgaatgcgactcctcagcagatgcctcagacagaaaaagcggtcgaagacttccttagaagcatcggtcggagtaaaaaggaacggaggcctgtgcgcccacacacggtcgagaaacctgtgcccagcagctctggtggagatgcccacgttccccatggctcccaggtcattaggaagctggtcatggaacccaccttcaagccctggcagatgaagactcacttcctgatgcccttcccggtgaattacgtgggtgaatgcatccgaactgtcccctacacggacccagatcatgccagtcttaaaatccttgcacgtttgatgactgccaaattcttgcatacagaaattcgagaaaaaggcggtgcttatggtggangcgcaaaactcagccacaatgggattttcaccctttactcttacagggacccaaatacaatagagacgctccagtcttttgggaaggctgtcgactgggctaagtctggaaaattcacacagcaagacatcgacgaagccaaactttctgtcttctcaaccgtagatgctcctgtcgctccttcagacaaaggaatggaccacttcttgtacggcctctcggatgagatgaagcaggcccacagagagcagctctttgctgtcagccacgacaagctcctggccgtgagcgataggtacctcggcactgggaagagcacacacggcctggccatcctcggacccgagaacccgaaaattgccaaggacccatcctggatcatccgatgagcagccgtggcgctcgactgcacaggagcccgagacaatacacctccaagctgaatatgaaaagtcagaaatgctactgctttttccaagaatattatgtcattgagtgtcgccaaagcccttgactggcgagtcaaaaactcagatctatcttaagagtgaccaggaagaggttcattgaaataatcatgcatgaagcgccaaagatgcaccatgtagaattttcactttgtactggcaggctcgttttacctgattctagaatatttaagaatctaaaaataaagggcaactctgactta

SEQ ID NO: 105 - DNA, 2579 bp, Homo sapiens
tgagaccgtcagaagcctcatagacagaacgattgatgaagtagttgagaaaggatttgaagatgatcgaattgaggctttacttcataaaattgaaatacagatgaaacatcagtctaccagctttgggctgatgctgacatcagtaagtgatctctcaacaattttgtttttgttttataatagacattttgtcttgttactagcttaactggcattttgatatttttatgtgaaatagattactttaaatgggtaagggtttataactagtaatctgttggttatttcctaaacattatttcagcctgtgctttttattttattggaacaaaacagggctaaagtaagtttttttgtttctccatccaaagaattacatgacttttgttataaacaatcatctgtggtatatttaaatacagaaactaggattttagtatcaagtctgggctgttggtggaggttgtactgtggtaccagctgcattgtggatgtggaaatcttccttccagtacatagcttcttgctggaaccatgatggggaccctgtggagctcttgaagttgggaaatcagttagctaaattcagacagtgcctgcaggaaaatccaaaatttttgcaagaaaaagtaaaacagtattttaagaataaccagcataagctgactttatcgatgaggccagatgacaagtatcacgagaagcaggcacaggtggaagccacgaagctcaagcagaaggtcgaggctctgtcccccggagacaggcagcagatctacgagaaaggtctagaattacggagtcaacaaagcaaacctcaagatgcctcttgtctgccagcgttgaaagtttccgatattgaacccaccatacctgtcacagagttggacgtggtcctgacagctggagatatccctgttcagtactgcgcccagcccaccaatggcatggtgtatttccgggccttctccagcctgaacacactccccgaggagctgaggccctatgtgcccctcttctgcagcgtcctcaccaagctgggctgcggccttcttgactaccgggagcaggctcagcagatagaattgaagaccggagggatgagtgcttctccccacgtgctccccgacgactcacacatggacacctacgagcagggtgtgcttttctcctctctctgcctggatcgaaacctgccagacatgatgcagctatggagtgaaatatttaacaacccgtgctttgaagaagaggagcacttcaaggtgctggtgaagatgaccgcccaggagctcgccaatggaattcctgactctgggcacctgtacgcatccatcagggcaggccggaccctcacgcccgcaggggacctgcaggagaccttcagcgggatggatcaggtgcggctgatgaagaggattgcagaaatgacagatatcaaacccatcctgaggaagctcccacgtatcaagaaacacttgttaaatggtgataatatgaggtgttcagtgaatgcgactcctcagcagatgcctcagacagaaaaagcggtcgaagacttccttagaagcatcggtcggagtaaaaaggaacggaggcctgtgcgcccacacacggtcgagaaacctgtgcccagcagctctggtggagatgcccacgttccccatggctcccaggtcattaggaagctggtcatggaacccaccttcaagccctggcagatgaagactcacttcctgatgcccttcccggtgaattacgtgggtgaatgcatccgaactgtcccctacacggacccagatcatgccagtcttaaaatccttgcacgtttgatgactgccaaattcttgcatacagaaattcgagaaaaaggcggtgcttatggtggaggcgcaaaactcagccacaatgggattttcaccctttactcttacagggacccaaatacaatagagacgctccagtcttttgggaaggctgtcgactgggctaagtctggaaaattcacacagcaagacatcgacgaagccaaactttctgtcttctcaaccgtagatgctcctgtcgctccttcagacaaaggaatggaccacttcttgtacggcctctcggatgagatgaagcaggcccacagagagcagctctttgctgtcagccacgacaagctcctggccgtgagcgatagatacctcggcactgggaagagcacacacggcctggccatcctcggacccgagaacccgaaaattgccaaggacccatcctggatcatccgatgagcagccgtggcgctcgactgcacaggagcccgagacaatacacctccgagctgaatatgaaaagtcagaaatgctactgctttttccaagaatattatgtcattgagtgtcgccaaagcccttgactggcgagtcaaaaactcagatctatcttaagagtgaccaggaagaggttcattgaaataatcatgcatgaagcgccaaagatgcaccatgtagaattttcactttgtactggcaggctcgttttacctcattctagaatatttaagaatctaaaaataaagggcaactctg

SEQ ID NO: 106 - DNA, 3066 bp, Homo sapiens
ccatctgagcgagaagagcagacaccgtgctcctggaatcacccagcatgttgcaaggtctcctgccagtcagtctcctcctctctgttgcagtaagtgctataaaagaactccctggggtgaagaagtatgaagtggtttatcctataagacttcatccactgcataaaagagaggccaaagagccagagcaacaggaacaatttgaaactgaattaaagtataaaatgacaattaatggaaaaattgcagtgctttatttgaaaaaaaacaagaacctccttgcaccaggctacacggaaacatattataattccactggaaaggagatcaccacaagcccacaaattatggatgattgttattatcaaggacatattcttaatgaaaaggtttctgacgctagcatcagcacatgtaggggtctaaggggctacttcagtcagggggatcaaagatactttattgaacctttaagccccatacatcgggatggacaggagcatgcactcttcaagtataaccctgatgaaaagaattatgacagcacctgtgggatggatggtgtgttgtgggcccacgatttgcagcagaacattgccctacctgccaccaaactagtaaaattgaaagacaggaaggttcaggaacatgagaaatacatagaatattatttggtcctggataatggtgagtttaaaaggtacaatgagaatcaagatgagatcagaaagagggtatttgagatggctaattatgtcaacatgctttataaaaagctcaatactcatgtggccttagttggtatggaaatctggactgacaaggataagataaagataaccccaaatgcaagcttcaccttggagaatttttctaaatggagggggagtgttctctcaagaagaaagcgtcatgatattgctcagttaatcacagcaacagaacttgctggaacgactgtgggtcttgcatttatgtctacaatgtgttctccttattctgttggcgttgttcaggaccacagcgataatcttcttagagttgcagggacaatggcacatgaaatgggccacaactttggaatgtttcatgacgactattcttgcaagtgtccttctacaatatgtgtgatggacaaagcactgagcttctatatacccacagacttcagttcctgcagccgtctcagctatgacaagttttttgaagataaattatcaaattgcctctttaatgctccattgcctacagatatcatatccactccaatttgtgggaaccagttggtggaaatgggagaggactgtgattgtgggacatctgaggaatgtaccaatatttgctgtgatgctaagacatgtaaaatcaaagcaacttttcaatgtgcattaggagaatgttgtgaaaaatgccaatttaaaaaggctgggatggtgtgcagaccagcaaaagatgagtgcgacctgcctgaaatgtgtaatggtaaatctggtaattgtcctgatgatagattccaagtcaatggcttcccttgccatcacgggaagggccactgcttgatggggacatgccccacactgcaggagcagtgcacagagctgtggggaccaggaactgaggttgcagataagtcatgttacaacaggaatgaaggtgggtcaaagtacgggtactgtcgcagagtggatgacacactcattccctgcaaagcaaatgataccatgtgtgggaagttgttctgtcaaggtgggtcggataatttgccctggaaaggacggatagtgactttcctgacatgtaaaacatttgatcctgaagacacaagtcaagaaataggcatggtggccaatggaactaagtgtggcgataacaaggtttgcattaatgcagaatgtgtggatattgagaaagcctacaaatcaaccaattgctcatctaagtgcaaaggacatgctgtgtgtgaccatgagctccagtgtcaatgtgaggaaggatggatccctcccgactgcgatgactcctcagtggtcttccacttctccattgtggttggggtgctgttcccaatggcggtcatttttgtggtggttgctatggtaatccggcaccagagctccagagaaaagcagaagaaagatcagaggccactatctaccactggcaccaggccacacaaacagaagaggaaaccccagatggtaaaggctgttcaaccccaagagatgagtcagatgaagccccatgtgtatgatctgccagtagaaggcaatgagcccccagcctcttttcataaagacacaaacgcacttccccctactgttttcaaggataatccaatgtctacacctaaggactcaaatccaaaagcatgaagcaacagctaagcaagaactaatggctaaattatcaacttggaaaactggaaaatctggatggcagagaaatatactatctcaccagtatttgctctcgactcaagaaggttaacattttctgattcatgttagactttgaagagactaaagaaaattttcaagaggaacatatgcctgagaacctttgcatgaatttaaaatttcaattatccattcttataagaaggaagatgattgtaaagaaatatctccgaagttaaaatctgtaataggaattgattcattctctaatgaaaacaaaacataaaaacatcacactaatcttggaggaataagaaaaattgtacatccattaaatgtacaattgattgcaacatcttgattgttttaaccattaacttgtcaaattacaatcacagttaagaaaatgatgtaaaattctgttttgtggatctctttcctagattagcttctgaaatcattattagctatatcatttgaggttttctacaatttggtataactaagaatttaaaaatgttttatcatatatatttgtataattaattactggcatggttaaagtggttttcactttttaaatggagaaaatttcagttaaattaataggataaaccaggttgcgaactggtgacctgtaggccatgttagcactgcaaaaaaaaaa

SEQ ID NO: 107 - DNA, 2087 bp, Homo sapiens
gcgagaagagcagacaccgtgctcctggaatcacccagcatgttgcaaggtctcctgccagtcagtctcctcctctctgttgcagtaagtgctataaaagaactccctggggtgaagaagtatgaagtggtttatcctataagacttcatccactgcataaaagagaggccaaagagccagagcaacaggaacaatttgaaactgaattaaagtataaaatgacaattaatggaaaaattgcagtgctttatttgaaaaaaaacaagaacctccttgcaccaggctacacggaaacatattataattccactggaaaggagatcaccacaagcccacaaattatggatgattgttattatcaaggacatattcttaatgaaaaggtttctgacgctagcatcagcacatgtaggggtctaaggggctacttcagtcagggggatcaaagatactttattgaacctttaagccccatacatcgggatggacaggagcatgcactcttcaagtataaccctgatgaaaagaattatgacagcacctgtgggatggatggtgtgttgtgggcccacgatttgcagcagaacattgccctacctgccaccaaactagtaaaattgaaagacaggaaggttcaggaacatgagaaatacatagaatattatctggtcctggataatggtgagtttaaaaggtacaatgagaatcaagatgagatcagaaagagggtatttgagatggctaattatgtcaacatgctttataaaaagctcaatactcatgtggccttagttggtatggaaatctggactgacaaggataagataaagataaccccaaatgcaagcttcaccttggagaatttttctaaatggagggggagtgttctctcaagaagaaagcgtcatgatattgctcagttaatcacagcaacagaacttgctggaacgactgtgggtcttgcatttatgtctacaatgtgttctccttattctgttggcgttgttcaggaccacagcgataatcttcttagagttgcagggacaatggcacatgaaatgggccacaactttggaatgtttcatgacgactattcttgcaagtgtccttctacaatatgtgtgatggacaaagcactgagcttctatatacccacagacttcagttcctgcagccgtctcagctatgacaagttttttgaagataaattatcaaattgcctctttaatgctccattgcctacagatatcatatccactccaatttgtgggaaccagttggtggaaatgggagaggactgtgattgtgggacatctgaggaatgtaccaatatttgctgtgatgctaagacatgtaaaatcaaagcaacttttcaatgtgcattaggagaatgttgtgaaaaatgccaatttaaaaaggctgggatggtgtgcagaccagcaaaagatgagtgcgacctgcctgaaatgtgtaatggtaaatctggtaattgtcctgatgatagattccaagtcaatggcttcccttgccatcacgggaagggccactgcttgatgggcacatgccccacactgcgggagcagtgcacagagctgtggggaccaggtaggaggacaaatcctttcccctgtgcatgtgcgaaggaaaatcatttcagatgacagtgtttaaccatggtcaaaagaccattctgtcctatccttcttagaagcttcgaactcaaaatcatggaaaggttttaagatttgaggttggttttagggttgctagatttagcaagtaaaaataaggatggccccgttaaattttaacttaaaattaacaagttttttgttaattttttgttttttgtctcagcatcagtatatcccatgcaatatttgaggtgtgctcatactaaaattatttgtgtatctgaaattcaaattaaactgggtgtctttttcttttcatctggcaaccctactaagatcataaacccttggaaatctgtgtgtgtgcgggtgtgtgtgtgtgtgtgtgtgcaggggtggcagaagtactgtgggatgggacagaaataaaaaaaaaaaaaaaaaaaaaaaaa

SEQ ID NO: 108 - DNA, 2786 bp, Homo sapiens
gcgagaagagcagacaccgtgctcctggaatcacccagcatgttgcaaggtctcctgccagtcagtctcctcctctctgttgcagtaagtgctataaaagaactccctggggtgaagaagtatgaagtggtttatcctataagacttcatccactgcataaaagagaggccaaagagccagagcaacaggaacaatttgaaactgaattaaagtataaaatgacaattaatggaaaaattgcagtgctttatttgaaaaaaaacaagaacctccttgcaccaggctacacggaaacatattataattccactggaaaggagatcaccacaagcccacaaattatggatgattgttattatcaaggacatattcttaatgaaaaggtttctgacgctagcatcagcacatgtaggggtctaaggggctacttcagtcagggggatcaaagatactttattgaacctttaagccccatacatcgggatggacaggagcatgcactcttcaagtataaccctgatgaaaagaattatgacagcacctgtgggatggatggtgtgttgtgggcccacgatttgcagcagaacattgccctacctgccaccaaactagtaaaattgaaagacaggaaggttcaggaacatgagaaatacatagaatattatctggtcctggataatggtgagtttaaaaggtacaatgagaatcaagatgagatcagaaagagggtatttgagatggctaattatgtcaacatgctttataaaaagctcaatactcatgtggccttagttggtatggaaatctggactgacaaggataagataaagataaccccaaatgcaagcttcaccttggagaatttttctaaatggagggggagtgttctctcaagaagaaagcgtcatgatattgctcagttaatcacagcaacagaacttgctggaacgactgtgggtcttgcatttatgtctacaatgtgttctccttattctgttggcgttgttcaggaccacagcgataatcttcttagagttgcagggacaatggcacatgaaatgggccacaactttggaatgtttcatgacgactattcttgcaagtgtccttctacaatatgtgtgatggacaaagcactgagcttctatatacccacagacttcagttcctgcagccgtctcagctatgacaagttttttgaagataaattatcaaattgcctctttaatgctccattgcctacagatatcatatccactccaatttgtgggaaccagttggtggaaatgggagaggactgtgattgtgggacatctgaggaatgtaccaatatttgctgtgatgctaagacatgtaaaatcaaagcaacttttcaatgtgcattaggagaatgttgtgaaaaatgccaatttaaaaaggctgggatggtgtgcagaccagcaaaagatgagtgcgacctgcctgaaatgtgtaatggtaaatctggtaattgtcctgatgatagattccaagtcaatggcttcccttgccatcacgggaagggccactgcttgatgggcacatgccccacactgcgggagcagtgcacagagctgtggggaccaggaactgaggttgcagataagtcatgttacaacaggaatgaaggtgggtcaaagtacgggtactgtcgcagagtggatgacacactcattccctgcaaagcaaatgataccatgtgtgggaagttgttctgtcaaggtgggtcggataatttgccctggaaaggacggatagtgactttcctgacatgtaaaacatttgatcctgaagacacaagtcaagaaataggcatggtggccaatggaactaagtgtggcgataacaaggtttgcattaatgcagaatgtgtggatattgagaaagcctacaaatcaaccaattgctcatccaagtgcaaaggacatgctgtgtgtgaccatgagctccagtgtcaatgtgaggaaggatggatccctcccgactgcgatgactcctcagtggtcttccacttctccattgtggttggggtgctgttcccaatggcggtcatttttgtggtggttgctatggtaatccggcaccagagctccagagaaaagcagaagaaagatcagaggccactatctaccactggcaccaggccacacaaacagaagaggaaaccccagatggtaaaggctgttcaaccccaagagatgagtcagatgaagccccatgtgtatgatctgccagtagaaggcaatgagcccccagcctcttttcataaagacacaaacgcacttccccctactgttttcaaggataatccaatgtctacacctaaggactcaaatccagaagcatgaagcaacagctaagcaagaactaatggttaaattatcaacttggaaaacttggaaaatctggatgccagagaaatatactatctcaccagtatttgctctcgactcaagaaggttaacattttctgattcatgttagactttgaagagactaaagaaaattttcaagaggaacatatgcctgagaacctttgcatgaatttaaaatttcaattatccattcttataagaaggaagatgattgtaaagaaatatctccgaagttaaaatctgtaataggaattgattcattctcttaatgaaaacaaaacataaaaacatcacactaatcttaggaataagaaaaattgtacatccattaaatgtacaattgattgcaacatcttgattgcaccaaaaaaaaaaaaaaaaaaaaaaaaaaa

SEQ ID NO: 109 - DNA, 3236 bp, Homo sapiens
gacccggccatgcgcggcctcgggctctggctgctgggcgcgatgatgctgcctgcgattgcccccagccggccctgggccctcatggagcagtatgaggtcgtgttgccgcggcgtctgccaggcccccgagtccgccgagctctgccctcccacttgggcctgcacccagagagggtgagctacgtccttggggccacagggcacaacttcaccctccacctgcggaagaacagggacctgctgggttccggctacacagagacctatacggctgccaatggctccgaggtgacggagcagcctcgcgggcaggaccactgcttataccagggccacgtagaggggtacccggactcagccgccagcctcagcacctgtgccggcctcaggggtttcttccaggtggggtcagacctgcacctgatcgagcccctggatgaaggtggcgagggcggacggcacgccgtgtaccaggctgagcacctgctgcagacggccgggacctgcggggtcagcgacgacagcctgggcagcctcctgggaccccggacggcagccgtcttcaggcctcggcccggggactctctgccatcccgagagacccgctacgtggagctgtatgtggtcgtggacaatgcagagttccagatgctggggagcgaagcagccgtgcgtcatcgggtgctggaggtggtgaatcacgtggacaagctatatcagaaactcaacttccgtgtggtcctggtgggcctggagatttggaatagtcaggacaggttccacgtcagccccgaccccagtgtcacactggagaacctcctgacctggcaggcacggcaacggacacggcggcacctgcatgacaacgtacagctcatcacgggtgtcgacttcaccgggactactgtggggtttgccagggtgtccgccatgtgctcccacagctcaggggctgtgaaccaggaccacagcaagaaccccgtgggcgtggcctgcaccatggcccatgagatgggccacaacctgggcatggaccatgatgagaacgtccagggctgccgctgccaggaacgcttcgaggccggccgctgcatcatggcaggcagcattggctccagtttccccaggatgttcagtgactgcagccaggcctacctggagagctttttggagcggccgcagtcggtgtgcctcgccaacgcccctgacctcagccacctggtgggcggccccgtgtgtgggaacctgtttgtggagcgtggggagcagtgcgactgcggcccccccgaggactgccggaaccgctgctgcaactctaccacctgccagctggctgagggggcccagtgtgcgcacggtacctgctgccaggagtgcaaggtgaagccggctggtgagctgtgccgtcccaagaaggacatgtgtgacctcgaggagttctgtgacggccggcaccctgagtgcccggaagacgccttccaggagaacggcacgccctgctccgggggctactgctacaacggggcctgtcccacactggcccagcagtgccaggccttctgggggccaggtgggcaggctgccgaggagtcctgcttctcctatgacatcctaccaggctgcaaggccagccggtacagggctgacatgtgtggcgttctgcagtgcaagggtgggcagcagcccctggggcgtgccatctgcatcgtggatgtgtgccacgcgctcaccacagaggatggcactgcgtatgaaccagtgcccgagggcacccggtgtggaccagagaaggtttgctggaaaggacgttgccaggacttacacgtttacagatccagcaactgctctgcccagtgccacaaccatggggtgtgcaaccacaagcaggagtgccactgccacgcgggctgggccccgccccactgcgcgaagctgctgactgaggtgcacgcagcgtccgggagcctccccgtcctcgtggtggtggttctggtgctcctggcagttgtgctggtcaccctggcaggcatcatcgtctaccgcaaagcccggagccgcatcctgagcaggaacgtggctcccaagaccacaatggggcgctccaaccccctgttccaccaggctgccagccgcgtgccggccaagggcggggctccagccccatccaggggcccccaagagctggtccccaccacccacccgggccagcccgcccgacacccggcctcctcggtggctctgaagaggccgccccctgctcctccggtcactgtgtccagcccacccttcccagttcctgtctacacccggcaggcaccaaagcaggtcatcaagccaacgttcgcacccccagtgcccccagtcaaacccggggctggtgcggccaaccctggtccagctgagggtgctgttggcccaaaggttgccctgaagccccccatccagaggaagcaaggagccggagctcccacagcaccctaggggggcacctgcgcctgtgtggaaatttggagaagttgcggcagagaagccatgcgttccagccttccacggtccagctagtgccgctcagccctagaccctgactttgcaggctcagctgctgttctaacctcagtaatgcatctacctgagaggctcctgctgtccacgccctcagccaattccttctccccgccttggccacgtgtagccccagctgtctgcaggcaccaggctgggatgagctgtgtgcttgcgggtgcgtgtgtgtgtacgtgtctccaggtggccgctggtctcccgctgtgttcaggaggccacatatacagcccctcccagccacacctgcccctgctctggggcctgctgagccggctgccctgggcacccggttccaggcagcacagacgtggggcatccccagaaagactccatcccaggaccaggttcccctccgtgctcttcgagagggtgtcagtgagcagactgcaccccaagctcccgactccaggtcccctgatcttgggcctgtttcccatgggattcaagagggacagccccagctttgtgtgtgtttaagcttaggaatgccctttatggaaagggctatgtgggagagtcagctatcttgtctggttttcttgagacctcagatgtgtgttcagcagggctgaaagcttttattctttaataatgagaaatgtatattttactaataaattattgaccgagttctgtagattcttgttaga

SEQ ID NO: 110 - DNA, 1127 bp, Homo sapiens
accaaatcaaccataggtccaagaacaattgtctctggacggcagctatgcgactcaccgtgctgtgtgctgtgtgcctgctgcctggcagcctggccctgccgctgcctcaggaggcgggaggcatgagtgagctacagtgggaacaggctcaggactatctcaagagattttatctctatgactcagaaacaaaaaatgccaacagtttagaagccaaactcaaggagatgcaaaaattctttggcctacctataactggaatgttaaactcccgcgtcatagaaataatgcagaagcccagatgtggagtgccagatgttgcagaatactcactatttccaaatagcccaaaatggacttccaaagtggtcacctacaggatcgtatcatatactcgagacttaccgcatattacagtggatcgattagtgtcaaaggctttaaacatgtggggcaaagagatccccctgcatttcaggaaagttgtatggggaactgctgacatcatgattggctttgcgcgaggagctcatggggactcctacccatttgatgggccaggaaacacgctggctcatgcctttgcgcctgggacaggtctcggaggagatgctcacttcgatgaggatgaacgctggacggatggtagcagtctagggattaacttcctgtatgctgcaactcatgaacttggccattctttgggtatgggacattcctctgatcctaatgcagtgatgtatccaacctatggaaatggagatccccaaaattttaaactttcccaggatgatattaaaggcattcagaaactatatggaaagagaagtaattcaagaaagaaatagaaacttcaggcagaacatccattcattcattcattggattgtatatcattgttgcacaatcagaattgataagcactgttcctccactccatttagcaattatgtcacccttttttattgcagttggtttttgaatgtctttcactccttttattggttaaactcctttatggtgtgactgtgtcttattccatctatgagctttgtcagtgcgcgtagatgtcaataaatgttacatacacaaataaataaaatgtttattccatggtaaattta

SEQ ID NO: 111 - DNA, 3158 bp, Homo sapiens
cctcgctcccggaccccacggctgcaaactgatctggcgcgcggggaggaggagagcgcaggcgagcgaacccgcgagagagggagagagcgagcgagcaacagcgagagcgagagcgagagagccgggaggcagagggagtagtgaccgccttccggagccgggattcatgcctgtcctcgggaccagcgaaggggactttacggctgagtatgagccaggctgctaggagccaggtacccccacgcctgcagtccccgcgccgtgcccggaatgcgagctggacgcagggctctcccaagttcccaccgagccgaataaaaagcgtccgcccgcagctctccgccaaagacggacattgactccaggactccacagaatggagcaagaatgagaggaaaaaggccggcagaaaagcatgaactggaggtttgttgagctcctctacttcctgtttatatggggccgtatctcagtgcagccctcccaccaggaaccagctgggacagaccaacatgtctccaaggaatttgattggctcatttcagacagggggcctttccaccactccaggagctacctatcctttgtggaaagacaccgtcaaggatttacaaccagatataaaatatacagggagtttgcccgttggaaggtgaggaacacagccatcgagaggagagatctggtccgccatccagtgcccctcatgccggagtttcaaaggagcatccgcctgcttggcaggagacctaccactcagcagttcatcgataccatcatcaaaaagtacggcacccacctgctcatctcagccacattgggaggggaggaggctttgaccatgtatatggacaaaagtcgcctcgacaggaagtcagggaatgccactcaaagtgttgaagctctgcaccagctcgcatcatcctactttgttgaccgtgatggtaccatgaggaggcttcatgagatccagatatcaactggagcaatcaaggtcacagagacacgcactgggcctctgggctgtaacagttatgacaatctggactctgtgagttccgtccttctgcaaagcacggagagcaaactgcaccttcaaggtcttcagataatctttcctcagtatctgcaagagaagtttgtccagtcggccttgagctatatcatgtgcaatggggagggggagtacctgtgccagaacagccagtgtcgctgccaatgtgccgaggagtttccgcagtgcaactgccccatcacggacatccagatcatggagtacacgctggccaacatggccaagtcttgggccgaagcttataaggacctggagaattcagatgagtttaaatcatttatgaagcgcctccccagcaaccacttcctgaccatcggaagcatccatcagcactggggcaatgactgggacctgcagaaccgctacaagctcctgcagagtgccacggaggcacagagacaaaagatccaacgcactgcccgcaagcttttcggcctcagtgtacgctgtcgccacaatcccaaccaccagctgcctagagagaggacaattcagcagtggcttgcaagggtccagtcactcctctactgtaatgagaatgggttttggggaaccttcctggagagccagcggagctgcgtgtgccacggcagcaccacgctgtgccagcgccccatcccctgcgtgataggcgggaacaacagctgcaccatgtgcagcctggccaacatctccctctgtggctcctgcaacaagggctacaagctgtatcgaggccgctgtgaaccacagaacgtggactcggagcggagcgagcagttcatcagctttgagactgacctggacttccaggacctggagctgaagtacctgctgcagaagatggactcacgcctctacgtccacaccaccttcatcagcaacgagatccgcctcgacaccttctttgaccctcggtggcgcaagcgcatgtccctcactctcaagagcaacaagaaccgcatggacttcatccacatggtgatcggcatgtccatgcgcatctgccagatgcgcaacagcagcctggaccccatgttctttgtctatgtcaacccctttagcgggagccattcggagggctggaacatgcccttcggggaatttggctacccacgctgggagaagatccgtctccaaaacagccagtgctacaactggactcttttgctgggcaatcggtggaaaacatttttcgagacggtccacatctacctacgtagtcggactcggctacctaccctactgcgaaatgagactggccagggccccgtggacctgtcggatccctccaagaggcagttctacatcaagatctcagacgtgcaggtgtttgggtatagcctgaggttcaacgccgacctcctgcgcagtgcagtgcagcaggtcaaccagtcctacacacagggcggccagttctattcctcttcgtcagtgatgctcctcttgttggatattcgggaccgaattaatcgcctggcccctcctgtggccccggggaaaccccagctggacttgttctcctgtatgctgaaacaccgcctgaaactgaccaacagcgagatcatcagggtgaaccacgccttggacctgtacaacacggagatcctcaaacagtcggaccagatgacagccaaactctgctaacccgggactccttgccatggacttttcctgttgttgtacacacacaacagaacaaaatgaagcaaaacaaaacaaaaaaacccacaaaaatttgtaaaatgtaattaatattcaaagaaaaggaggaaaatcttcatttgttggaaatgaaaacgttctagcaactgtataaaagcgttgggcatgtttgttatttctatactcactctgtcatgaagaagggtctcagccttttgtggagcattgagggagttgcttcttaggcctcaggtgctgtattgggggagaagggagaaagcatatgcaatgaattgtaaagatctctgctgtgcaggtgctaagattaaacactaaaaagaaagagagatatatgtaatgtacaactgacactgccatttttcctttttggaggaaatggacatagataaagaagatatttcttcggttaagattt

SEQ ID NO: 112 - DNA, 5860 bp, Homo sapiens
atgcaggagagccagaccaagagcatgttcgtgtcccgggccctggagaagatcctagccgacaaggaggtgaagcggccccagcactcccagctgcgcagggcctgccaggtggcgctcgatgaaattaaagcagaaatagaaaagcagaggcttggcactgctgcaccaccaaaggcaaacttcattgaagctgacaagtattttcttccattcgagctagcttgccagtccaagtccccaagggtagtcagcacatcccttgactgcttgcagaaactcatcgcatacgggcacatcactggcaacgcccctgacagtggagcccctgggaagcggctgatcgacagaattgttgaaaccatttgcagttgttttcagggccctcagactgatgaaggggttcagttacaaataattaaggctcttctgactgcagtgacttccccacacattgaaattcatgagggtactatcctgcagacagtgagaacatgttacaatatctatttggccagcaaaaatctcatcaatcaaaccactgccaaggctacccttactcagatgctgaacgtcattttcacccgcatggaaaaccaagtgttgcaggaggccagaagactggaaaaaccaatccagtcaaaaccccagtcccctgtgatccaagctgcagcagtatccccaaagttcgttcgtttgaagcacagtcaggcacaaagcaaaccaacaactcccgaaaaaacagatttaaccaacggtgaacatgccaggagtgattctggaaaagtaagcacagaaaatggagacgcacccagagaaagaggctcatcactgtcagggactgatgacggagcccaggaggtggtgaaggacatcttggaagatgtagtcacatctgccattaaagaagcagcggaaaagcatggtctgacagaacctgagagagttctaggtgaactggagtgccaggaatgtgctattcccccaggagttgatgaaaactcacagaccaacgggatagccgatgacaggcagtccttgtcgtcagcagataatctggaatcggatgcacaaggacatcaagtggctgccaggttctcccacgttctgcagaaggatgccttccttgtgttccgctccctgtgcaagctgtccatgaaaccccttggtgaaggccctccagacccaaaatcccatgagctgcgttccaaggtggtttccctgcagctgctcctctctgtgttgcaaaatgctggccccgtattcaggactcacgagatgttcatcaatgcaatcaagcaatatctctgtgtggccttgtccaaaaacggcgtctcttcagtgcctgatgtctttgagctctctcttgccatttttcttactcttctttcaaactttaaaatgcacttgaaaatgcagatagaggtctttttcaaagagattttcctgaacattttagaaacatcaacaagttcttttgagcacaggtggatggtcattcagactctgacgaggatctgtgcagatgcccagtgtgttgtggatatttatgtcaactacgactgtgatttaaatgctgctaacatttttgagcgccttgtaaatgatttatccaaaattgctcagggaagaagtggacatgagctgggaatgacacctctgcaggagctcagcctgaggaagaaaggcctggagtgcctcgtgtccattctcaagtgcatggtggagtggagcaaagacctgtatgtgaatcccaaccaccagaccagcctcggtcaggagaggctcacggatcaggaaataggggatgggaaaggccttgacatggcaagacggtgtagtgtgacgtccatggagtccacagtgtcctcggggacccagacaactgttcaggatgaccctgagcaatttgaggtcatcaagcaacaaaaagaaatcattgaacacggcatcgagctgttcaacaagaaacccaagagggggatccagtttctccaggagcagggcatgctgggaacgtcagttgaagacatagcccaattcctgcaccaggaggagcgcctggattccacccaagtaggcgattttctgggagatagcgcaaggttcaacaaggaggtgatgtatgcctacgtggaccaacttgacttctgtgaaaaagaatttgtctcagccctgcggacattcctagaaggtttccgcctacctggagaagcccaaaagattgaccgattaatggagaagtttgccgcaagatacatagaatgcaaccaagggcaaactctgtttgctagtgctgacactgcttatgtcctagcgtattcaattattatgctgactacagacttgcacagtcctcaggtaaaaaataaaatgacgaaagagcagtatattaaaatgaatcggggtatcaatgatagtaaagatctgccagaagagtatctctcaagcatctatgaagagatagaaggcaagaaaattgcaatgaaagaaacaaaagagctaacgattgcaaccaaatctactaagcagaatgtagctagtgaaaagcagcggcggctgctgtacaacttagagatggagcaaatggctaaaacagccaaagctctgatggaggctgtgagccatgccaaagccccgtttaccagtgccactcacctggaccatgtccggccaatgttcaaactggtgtggacgccactattggcagcctacagcatcggactccagaactgtgatgacactgaagtggcctccttgtgtttggaaggcatccgatgtgcaatccgaatcgcctgcatctttggaatgcagctggaacgagatgcctatgttcaggctcttgctcgcttctccctactcacagccagctccagcatcacaaaaatgaagcagaaaaacatcgacaccattaagacgcttatcacagtggctcacaccgatggcaactaccttgggaattcctggcatgagatcttgaaatgcatcagccagctggagctcgctcagctgataggaaccggtgtgaagacgcgctacctgtctggatctgggcgtgaaagagaagggagcctgaagggccacacattggcaggagaagagttcatgggccttggcctcggtaatttggtgagtggcggagtgaataaaagacagatggccagcttccaagaatcggttggtgagaccagctcgcagagtgtggttgtagctgtggacaggatttttactgggtctaccagactggatggaaatgcaatagttgactttgtccgctggctgtgtgctgtgtccatggatgaactggcttccccccaccatcctcgcatgttcagcttgcagaagattgtggagatatcatactacaacatgaatcggatccgactacagtggtctcgaatatggcatgtgattggagatcacttcaataaggttggctgcaaccctaatgaagatgtggctatctttgctgttgactcattaaggcaactctccatgaagtttcttgagaagggtgaattagccaacttccgtttccagaaagattttctgaggccctttgagcatattatgaagaaaaacaggtctcccaccatccgggacatggcgatccgctgcattgcccagatggtgaactcccaggcggccaacatccgctcaggctggaagaacatctttgccgtgttccaccaggcagcctctgatcatgatgggaacattgtggagctggccttccagaccacttgccacattgtcacaactattttccagcaccattttcctgcagccatcgattcctttcaggatgctgtgaagtgcttatcagagttcgcctgcaacgccgctttccctgacacgagcatggaagcgattcggctcatccgcttctgtggcaaatacgtctctgagaggcctcgggtgctacaagaatacacaagtgatgacatgaatgtagctcctggtgacagagtctgggtccgaggctggttccccatcttattcgaactctcctgcatcattaatagatgcaagttagatgtacgaacaaggggactcacagtcatgtttgagatcatgaagagctatggccacacctttgaaaagcactggtggcaggacctgttcagaatcgtgtttcggatttttgacaatatgaaactccctgagcaactgtcagagaaatctgagtggatgacaacaacctgcaatcacgcactttatgctatttgtgatgtttttacccagttttatgaagctttgaatgaagttcttctttctgatgtatttgcacaattgcagtggtgtgtcaaacaagataatgaacagttggcgcgatcaggtacaaattgcttagaaaacttagtaatatccaatggagagaaattcagtcctgaagtctgggatgaaacctgcaactgtatgttggatattttcaaaacaaccatcccacatgttttgctgacatggagacctgtaggaatggaggaagattcatcagaaaagcatttggatgtggatctggaccgccagtctttaagcagcatagataaaaatccctctgagaggggacagagccagctctctaacccaacagatgacagctggaagggtagaccatacgcaaatcagaaactgtttgccagcctcctcatcaagtgtgtggtccagttggaattgatacagaccattgacaacattgtgttctaccctgcgacgagcaaaaaggaggatgcagagcacatggttgccgcccagcaagacacgctggatgcagatatccacatagagacggaggatcagggcatgtataagtacatgtcttcccagcacctcttcaagctgttggactgtttgcaggaatcccattcattctcaaaggccttcaactccaattacgagcagcggactgtcctgtggcgagcaggttttaagggcaagtctaaacccaatcttctaaaacaagaaaccagcagcctggcctgttgtttgaggatcctgtttcgaatgtatgttgatgagaaccgcagggattcctgggaagaaatacagcagagacttttaactgtttgcagtgaagctcttgcctatttcatcactgtgaattctgagagccatcgggaggcctggacaagtctcttgttgttacttctaactaaaaccctcaaaataaatgatgaaaagttcaaagcacatgcttcaatgtactacccctacttgtgtgaaattatgcagtttgacctgatccctgagctccgagcagttctgcggaagttcttcctacggataagtgttgtgtataagatatggataccagaagagccatcacaggtaccagcagcactgtcaccagtgtggtagccctggctgcccaggccagtgctgcagctctgcagaatgttcagcatgccatttctgactggcacatctcgtgaagtttcatagaaacaaggagttggcatcttggatctcagaatggcctggaaacggatggcctctacgctgttccatcacagtctccaactaaggcttatggtatttcattaaactgttgcatacccagttagcacagtaggtggggagtctgcttcatttctatcattccatttttctgattaaactgtcaaatctgtcattgcatatgccatcgttttctagcaaaatcccatgattggctataaacgttttgtaagaagtcactctccttgaaaatactgaacatagctgtataggtttgtgattattagagaatatgttaataaaacttcttgtaacggctaactgccacctaaaatatgctgggttttctgttgtttgagtgtgttagagaaatttgaatgtttttgtcagttacgagtcagcc

SEQ ID NO: 113 - DNA, 619 bp, Homo sapiens
tgcagcttccttctcaccttgaagaataatcctagaaaactcacaaaatgtgtgatgcttttgtaggtacctggaaacttgtctccagtgaaaactttgatgattatatgaaagaagtaggagtgggctttgccaccaggaaagtggctggcatggccaaacctaacatgatcatcagtgtgaatggggatgtgatcaccattaaatctgaaagtacctttaaaaatactgagatttccttcatactgggccaggaatttgacgaagtcactgcagatgacaggaaagtcaagagcaccataaccttagatgggggtgtcctggtacatgtgcagaaatgggatggaaaatcaaccaccataaagagaaaacgagaggatgataaactggtggtggaatgcgtcatgaaaggcgtcacttccacgagagtttatgagagagcataagccaagggacgttgacctggactgaagttcgcattgaactctacaacattctgtgggatatattgttcaaaaagatattgttgttttccctgatttagcaagcaagtaattttctcccaagctgattttattcaatatggttacgttggttaaataactttttttagatttag

SEQ ID NO: 114 - DNA, 1842 bp, Homo sapiens
gttgccagggagcggcgcgggagccctgaggggactgcggcggctgcgcggaggagcgaggcgcttgctggggtcggggctgcgcgacggcgcaggggctgcggggagcgccgcgcaggccgtgcagttcctagcgaggaggcgccgccgccattgccgctctctcggtgagcgcagccccgctctccgggccgggccttcgcgggccaccggcgccatgggccagtgcggcatcacctcctccaagaccgtgctggtctttctcaacctcatcttctggggggcagctggcattttatgctatgtgggagcctatgtcttcatcacttatgatgactatgaccacttctttgaagatgtgtacacgctcatccctgctgtagtgatcatagctgtaggagccctgcttttcatcattgggctaattggctgctgtgccacaatccgggaaagtcgctgtggacttgccacgtttgtcatcatcctgctcttggtttttgtcacagaagttgttgtagtggttttgggatatgtttacagagcaaaggtggaaaatgaggttgatcgcagcattcagaaagtgtataagacctacaatggaaccaaccctgatgctgctagccgggctattgattatgtacagagacagctgcattgttgtggaattcacaactactcagactgggaaaatacagattggttcaaagaaaccaaaaaccagagtgtccctcttagctgctgcagagagactgccagcaattgtaatggcagcctggcccacccttccgacctctatgctgaggggtgtgaggctctagttgtgaagaagctacaagaaatcatgatgcatgtgatctgggccgcactggcatttgcagctattcagctgctgggcatgctgtgtgcttgcatcgtgttgtgcagaaggagtagagatcctgcttacgagctcctcatcactggcggaacctatgcatagttgacaactcaagcctgagctttttggtcttgttctgatttggaaggtgaattgagcaggtctgctgctgttggcctctggagttcatttagttaaagcacatgtacactggtgttggacagagcagcttggcttttcatgtgcccacctacttacctactacctgcgactttctttttccttgttctagctgactcttcatgcccctaagattttaagtacgatggtgaacgttctaatttcagaaccaattgcgagtcatgtagtgtggtagaattaaaggaggacacgagcctgcttctgttacctccaagtggtaacaggactgatgccgaaatgtcaccaggtcctttcagtcttcacagtggagaactcttggccaaaggtttttggggggaggaggaggaaaccagctttctggttaaggttaacaccagatggtgcccctcattggtgtccttttaaaaaatatttactgtagtccaataagatagcagctgtacaaaatgactaaaatagattgtaggatcatatggcgtatatcttggttcatcttcaaaatcagagactgagctttgaaactagtggtttttaatcaaagttggctttataggaggagtataatgtatgcactactgttttaaaagaattagtgtgagtgtgtttttgtatgaatgagcccattcatggtaagtcttaagcttgttggaaataatgtacccatgtagactagcaaaatagtatgtagatgtgatctcagttgtaaatagaaaaatctaattcaataaactctgtatcagcccccaacatattatttttcattatttgggggatatttcagttccaaaaaaaaaaaaaaaaaa

SEQ ID NO: 115 - DNA, 965 bp, Homo sapiens
ggcacgagggagagagagagacttaagtctaaggcactgagcgtatcatgttaaagatgagcgggtggcagcgacagagccaaaatcagagctggaacctgaggagagagtgttcaagaaggaagtgtatcttcatacatcaccacacctgaaagcagatgtgcttttccagactgatccaactgcagagatggcagctgagtcattgcctttctcctttgggacactgtccagctgggagctggaagcctggtatgaggacctgcaagaggtcctgtcttcagatgaaaatgggggtacctatgtttcacctcctggaaatgaagaggaagaatcaaaaatcttcaccactcttgaccctgcttctctggcttggctgactgaggaggagccagaaccagcagaggtcacaagcacctcccagagccctcactctccagattccagtcagagctccctggctcaggaggaagaggaggaagaccaagggagaaccaggaaacggaaacagagtggtcattccccagcccgggctggaaagcagcgcatgaaggagaaagaacaggagaatgaaaggaaagtggcacagctagctgaagagaatgaacggctcaagcaggaaatcgagcgcctgaccagggaagtagaggcgactcgccgagctctgattgaccgaatggtgaatctgcaccaagcatgaacaattgggagcatcagtcccccacttgggccacactacccacctttcccagaagtggctactgactaccctctcactagtgccaatgatgtgaccctcaatcccacatacgcagggggaaggcttggagtagacaaaaggaaaggtctcagcttgtatatagagattgtacatttatttattactgtccctatctattaaagtgactttctatgaaaaaaaaaaaaaaaaaaaaaaaaaaaaaaaaaaaaaaaaaaaaaaaaaa

SEQ ID NO: 116 - DNA, 777 bp, Homo sapiens
ggccccttgtctgcagagatggctcccaatgcttcctgcctctgtgtgcatgtccgttccgaggaatgggatttaatgacctttgatgccaacccatatgacagcgtgaaaaaaatcaaagaacatgtccggtctaagaccaaggttcctgtgcaggaccaggttcttttgctgggctccaagatcttaaagccacggagaagcctctcatcttatggcattgacaaagagaagaccatccaccttaccctgaaagtggtgaagcccagtgatgaggagctgcccttgtttcttgtggagtcaggtgatgaggcaaagaggcacctcctccaggtgcgaaggtccagctcagtggcacaagtgaaagcaatgatcgagactaagacgggtataatccctgagacccagattgtgacttgcaatggaaagagactggaagatgggaagatgatggcagattacggcatcagaaagggcaacttactcttcctggcatcttattgtattggagggtgaccaccctggggatggggtgttggcaggggtcaaaaagcttatttcttttaatctcttactcaacgaacacatcttctgatgatttcccaaaattaatgagaatgagatgagtagagtaagatttgggtgggatgggtaggatgaagtatattgcccaactctatgtttctttgattctaacacaattaattaagtgacatgatttttactaatgtattactgagactagtaaataaatttttaaggcaaaatagagcattc

SEQ ID NO: 117 - DNA, 3246 bp, Homo sapiens
  misc_feature (2530)..(2530): "n" = a, t, g, or c.
agtgtggttttagtttttcctaagaagtggcgtggtttggggctttatatccgggaggagcatatgtacgcaaatcctggggcgtttgcaaacccggatccggggcgtctggccccatgcccggccgggcgtttgagggctactgccacgcagcgtttctggagcctgccggctggtgccctggtggcctttatctctgtccccctttgtcctctttatctcaggctctccaggaggccggggggcccactccgcctatcgctcccctcggctacgctgccactccaatgccccgcaggtcgcgagctgctgttctttcgaaggcgccggagaaccaggggcgtcccgcgccacctctgactcggagcagcgccgagcactgacgctcccgcccttgggcaaggacgccagtgcgcccgcgcgcgtccctctgcgcggcagcccgtcgcgggccctcaaggggaagcccaggccaggatggccccgggtcgcgcggtggccgggctcctgttgctggcggccgccggcctcggaggagtggcggaggggccagggctagccttcagcgaggatgtgctgagcgtgttcggcgcgaatctgagcctgtcggcggcgcagctccagcacttgctggagcagatgggagccgcctcccgcgtgggcgtcccggagcctggccagctgcacttcaaccagtgtttaactgctgaagagatcttttcccttcatggcttttcaaatgctacccaaataaccagctccaaattctctgtcatctgtccagcagtcttacagcaattgaactttcacccatgtgaggatcggcccaagcacaaaacaagaccaagtcattcagaagtttggggatatggattcctgtcagtgacgattattaatctggcatctctcctcggattgattttgactccactgataaagaaatcttatttcccaaagattttgaccttttttgtggggctggctattgggactcttttttcaaatgcaattttccaacttattccagaggcatttggatttgatcccaaagtcgacagttatgttgagaaggcagttgctgtgtttggtggattttacctacttttcttttttgaaagaatgctaaagatgttattaaagacatatggtcagaatggtcatacccactttggaaatgataactttggtcctcaagaaaaaactcatcaacctaaagcattacctgccatcaatggtgtgacatgctatgcaaatcctgctgtcacagaagctaatggacatatccattttgataatgtcagtgtggtatctctacaggatggaaaaaaagagccaagttcatgtacctgtttgaaggggcccaaactgtcagaaatagggacgattgcctggatgataacgctctgcgatgccctccacaatttcatcgatggcctggcgattggggcttcctgcaccttgtctctccttcagggactcagtacttccatagcaatcctatgtgaggagtttccccacgagttaggagactttgtgatcctactcaatgcagggatgagcactcgacaagccttgctattcaacttcctttctgcatgttcctgctatgttgggctagcttttggcattttggtgggcaacaatttcgctccaaatattatatttgcacttgctggaggcatgttcctctatatttctctggcagatatgtttccagagatgaatgatatgctgagagaaaaggtaactggaagaaaaaccgatttcaccttcttcatgattcagaatgctggaatgttaactggattcacagccattctactcattaccttgtatgcaggagaaatcgaattggagtaatagaaaatggaagatggtgttgttaataaaggcatttaatagataaaaacatctccaaaaaggattttgaagctgatcctatttagttaaaaagataattttgctttcaactgtaggtccagaaaactaattattggcatcagtctgtgaaatagtccattatttgttgttaaaaatgcttcaaaaggttttcagtgtcagtctgagatgcctggtatataggagcctttgggaaatacttatttttcagtattccatgcatattagatatcaccatgaagcaagagacatgcattctataatcatgtagacactcagactcaggggaaaatacaagttatatcctgaaagcctttaaaactctatggtaggatcaaagattcaaatggtttcagagaggttttatttcaattaatttgttctagtgctttcaagagcaagtacatcaaaatgtagaaggtaaaatgtatgcaacactaatataaattattccaagtctttaaggagccaaagaaaaaaaagatttctcacagctttttgttctgttttgtatttcaattaggaacttgcagtattattttgaaaaccattctaaaataataggagttaggaaataaataaagttttgctagccctgctaagttcaggcttagaggcttatcgctaagtntaaacttcaccagattccacgaaaagctggatagctttttttctgacttatgttgtggttgcacccctcacaaatggcagaacagtatgtaaagctggtaacacctcggtttcagtgcaccatgtgtttgctttgtgaaggtgaagaatatgttggtttagagaaagaaattggatgtaattttatgcaatttacttttaaagacaaacataactatttagcagagaatattttaataaatgcaaaacaacagctggactgctgtacatcaaggacagattaactggaaaacatatgttccttatgtgtgattgagagccattcagaaaagacttcctttgtgttcagcctatacttttccatatggtataccttgaaaaaaattagcacaccatggttatttttctaccttttataaaagacagagcctgtttactcatttagaagatagagaaaattggtctaaaattgaacatcctagattcacactcccaagtcacttaaggtgatttgatggtgaggaaaatgattgacaaagcccaacaatgatctcaggaattacattttccaacagaccaaaaaatgttttcatgtagcagcaatgcagatttggtgaatatttaatatatattttagtatgtatttcactttatgactgacaattaaaaaatattgtttggccaaatagtaaacacccttttgaaaccatgaaaaaa

SEQ ID NO: 118 - DNA, 1843 bp, Homo sapiens
ggcacgagcaagacatcaactgaatgaggattttaaaaaatggtatataagcataggacaagggctatgtttgtttgtttttcaaaagtgctttgaagataacagcctttaggtttgagttatttcacttttcataatttttaagtagcttatatataatggtggtaccataggattttcttttttcaaatgactgtcggcagaaacagtgggcactgactcaccttttgagttttagcagagaattatttatttctttacaatgcactttctaacccattgtagctatattagcattatcttttaaaaaagacatgcttttgtatttaaatattgtaggatttaagtgtctttctcaaaatagcttattcctttctgaaagaaaatgagggaaatactctgaattattaggagacttaaacccaatatttaaatatgctattttataacactgcatcagttttaggagttgcatctctcctgctggctcttttatatttgagcaagatcagtgtagaatatgtgtttagaaacttgtctgttgtctcagtttagtgaaaaggaggtgctgcatgtgcctgaattaaaaccaagaaatttttccaagccaaatgcagccttagtgatgagagatttaattctccattgtcaccttttagcttttatgattgcttagttttttctgaaggatgtctgcattgtaaaactatggactaaaacctaaaaaacagaatcctcaaaaactttgctgtatgtgttttaacattttagagaacagtatgttgaataactaaggtatgtaacttgaataggaaaaatgtccatcaaatgcaccttggaaaatcacagtaggtagaaggctgtgttaaccgtttgtgtcttattaacatccttaagttaattttgaatttttgacagttttgagggaaaagacctatggaacctaatgtgaagtatttcgtatgttaactggtgttgagttgaagatttttactgtgtataagcagatatcatttgaatgataaaaatgtcattaacctgctgtcttaagatgttcacacaaatatggagagtaattctacaatataaaaatatttattttaatactgagtttcagttaagtcataaacagtgttaaaactcttgggaaggtgtaggggttttttgtttgtcatttttaaaattgaaactgtgtcatacagtgtttcacgtctctgaaattgggattataatagcactattttgatgtagctctaccgatactatgtggtaatgctattttgttttactaacaagctctggaatatttagcagtcattttcactggcacaagagccttttgtatgttattcaatttaaacttttaaaccaaaaattttatggtccagtgtctttggcaaaaagatgctggagggaatgtaacatacaattaatatgtggttatatatatatataaaaagacacaaattgccatgttatggttctgccttgaaacagcacaatgaagtgtatcagtatattctgtgattatgaaacttatatgttgtgttgttttgtgtcttctgttgcctgtcctttgggccagatgtgggccagttaaatgcagttatcatctcattaaatacagatgcagataaaatatctttagtgctgcaacattttacctaactttttgtatgttttcatgactgtgtgttattttccaaagctgttcctacctcaccatgaggctttatggattgttatgtattataaatgttctatatgagacagactactgtgtttcttctcatttattaaaagttaagtagaaaaataaactaattttaatatctaaaaaaaa

SEQ ID NO: 119 - DNA, 1471 bp, Homo sapiens
gtggccgcgcaggaggacggagccctaaccgcaacccgcgccgcgccgcgccgatttgatttgtatccactgtcaccagcactgctcacttaggactttctggatccagacccaggcagcgcacactggactcttgaggaagaaggagactctaattttggattccttggtggaggaaaataaaacactctggtcttgccgccaacgatgcaagtgtgactgctggcgtcttcatgagctccagaggtcacagcacgctaccaaggactctcatggcccctcggatgatttccgagggagacataggaggcattgctcaaatcacctcctctctattcctgggcagaggcagtgtggcctccaatcggcacctcctccaggctcgtggcatcacctgcattgttaatgctaccattgagatccctaatttcaactggccccaatttgagtatgttaaagtgcctctggctgacatgccgcatgcccccattggactgtactttgacaccgtggctgacaagatccacagtgtgagcaggaagcacggggccaccttggtgcactgtgctgcaggggtgagccgctcagccacgctgtgtatcgcgtacctgatgaaattccacaacgtgtgcctgctggaggcatacaactgggtgaaagcccggcgacctgtcatcaggcccaacgtaggcttctggaggcaactgatagactacgagcgccagctctttgggaagtcgacagttaaaatggtacagacaccttatggcatagttcccgacgtctatgagaaggagtcccgacacctgatgccttactgggggatttagtgccactgaagcctgcgtcagcagcccgagcggggccggcatctgctccccgccgtctgctccctctccactctcttctcaaatggctgacttctggttctccctcaagtgttttttacactgggtgttcaaatttattttaagagatagggagggaggggacataaagggaatgcatacattgctagtcacatttttaaaattaacattttggaatagtgtttatggaaatctttagcttttaatcatttttaccaatttgaacagtttaataaactggttctgctctcttctgaatctcatgcctttggcaccttggtaggtgcaggaggagctcagtgcaaaaatcactttggggcctcattaaccctttagagacaagctttgccccaggctgcggaccagacagatgcttagggaaggttgataccagcttcagtctctactggattagccctactctttcctttcccctccattatttagtgactctgtaagtaagttaaatacacccttattatttagctgttaagtaactataatgaaatctgctgcaaaatctctcttggaatccatgtgcccaggattatattagcattatttttaataaatctatatgcttaaaaaaaaaaaaaaaaaaa

SEQ ID NO: 120 - DNA, 1413 bp, Homo sapiens
agggaataaaggctcagggaccggcagttctactctagagcccaccagcctctcagagcctccggtgactggcctgtgtctccccctggatggacatgtggacggcgctgctcatcctgcaagccttgttgctaccctccctggctgatggtgccacccctgccctgcgctttgtagccgtgggtgactggggaggggtccccaatgccccattccacacggcccgggaaatggccaatgccaaggagatcgctcggactgtgcagatcctgggtgcagacttcatcctgtctctaggggacaatttttacttcactggtgtgcaagacatcaatgacaagaggttccaggagacctttgaggacgtattctctgaccgctcccttcgcaaagtgccctggtacgtgctagccggaaaccatgaccaccttggcaatgtctctgcccagattgcatactctaagatctccaagcgctggaacttccccagccctttctaccgcctgcacttcaagatcccacagaccaatgtgtctgtggccatttttatgctggacacagtgacactatgtggcaactcagatgacttcctcagccagcagcctgagaggccccgagacgtgaagctggcccgcacacagctgtcctggctcaagaaacagctggcggcggccagggaggactacgtgctggtggctggccactaccccgtgtggtccatagccgagcacgggcctacccactgcctggtcaagcagctacggccactgctggccacatacggggtcactgcctacctgtgcggccacgatcacaatctgcagtacctgcaagatgagaatggcgtgggctacgtgctgagtggggctgggaatttcatggacccctcaaagcggcaccagcgcaaggtccccaacggctatctgcgcttccactatgggactgaagactcactgggtggctttgcctatgtggagatcagctccaaagagatgactgtcacttacatcgaggcctcgggcaagtccctctttaagaccaggctgccgaggcgagccaggccctgaactcccatgactgcccagctctgaggcccgatctccactgttgggtgggtggcctgccgggaccctgctcacaggcaggcttttcctccaacctgtggcgctgcagcagggcaggaaggggaaacacagctgatgaactgtggtgccacatgacccttgtggcacagatgcccacgtatgtgaaacacacatggacatgtgtcccagccacagtgttatgctctgtggctggctcacctttgctgagttccggggtgcaatgggggagggagggagggaaagcttcctcctaaatcaagcatctttctgttactgatgttcaataaaagaatagttgccaaggctg

SEQ ID NO: 121 - DNA, 1216 bp, Homo sapiens
ggcagctgcacggctcctggccccggagcatgcgcgagagccgccccggagcgccccggagccccccgccgtcccgcccgcggcgtcccgcgccccgccgccagcgcacccccggacgctatggcccacccctccggctggccccttctgtaggatggtagcacacaaccaggtggcagccgacaatgcagtctccacagcagcagagccccgacggcggccagaaccttcctcctcttcctcctcctcgcccgcggcccccgcgcgcccgcggccgtgccccgcggtcccggccccggcccccggcgacacgcacttccgcacattccgttcgcacgccgattaccggcgcatcacgcgcgccagcgcgctcctggacgcctgcggattctactgggggcccctgagcgtgcacggggcgcacgagcggctgcgcgccgagcccgtgggcaccttcctggtgcgcgacagccgccagcggaactgctttttcgcccttagcgtgaagatggcctcgggacccacgagcatccgcgtgcactttcaggccggccgctttcacctggatggcagccgcgagagcttcgactgcctcttcgagctgctggagcactacgtggcggcgccgcgccgcatgctgggggccccgctgcgccagcgccgcgtgcggccgctgcaggagctgtgccgccagcgcatcgtggccaccgtgggccgcgagaacctggctcgcatccccctcaaccccgtcctccgcgactacctgagctccttccccttccagatttgaccggcagcgcccgccgtgcacgcagcattaactgggatgccgtgttattttgttattacttgcctggaaccatgtgggtaccctccccggcctgggttggagggagcggatgggtgtaggggcgaggcgcctcccgccctcggctggagacgaggccgcagaccccttctcacctcttgagggggtcctccccctcctggtgctccctctgggtccccctggttgttgtagcagcttaactgtatctggagccaggacctgaactcgcacctcctacctcttcatgtttacatatacccagtatctttgcacaaaccaggggttgggggagggtctctggctttatttttctgctgtgcagaatcctattttatattttttaaagtcagtttaggtaataaactttattatgaaagtttttttttt

SEQ ID NO: 122 - DNA, 1838 bp, Homo sapiens
aattcttcacctcttttctcagctccctgcagcatgggtgctgggccctccttgctgctcgccgccctcctgctgcttctctccggcgacggcgccgtgcgctgcgacacacctgccaactgcacctatcttgacctgctgggcacctgggtcttccaggtgggctccagcggttcccagcgcgatgtcaactgctcggttatgggaccacaagaaaaaaaagtagtggtgtaccttcagaagctggatacagcatatgatgaccttggcaattctggccatttcaccatcatttacaaccaaggctttgagattgtgttgaatgactacaagtggtttgccttttttaagtataaagaagagggcagcaaggtgaccacttactgcaacgagacaatgactgggtgggtgcatgatgtgttgggccggaactgggcttgtttcaccggaaagaaggtgggaactgcctctgagaatgtgtatgtcaacacagcacaccttaagaattctcaggaaaagtattctaataggctctacaagtatgatcacaactttgtgaaagctatcaatgccattcagaagtcttggactgcaactacatacatggaatatgagactcttaccctgggagatatgattaggagaagtggtggccacagtcgaaaaatcccaaggcccaaacctgcaccactgactgctgaaatacagcaaaagattttgcatttgccaacatcttgggactggagaaatgttcatggtatcaattttgtcagtcctgttcgaaaccaagcatcctgtggcagctgctactcatttgcttctatgggtatgctagaagcgagaatccgtatactaaccaacaattctcagaccccaatcctaagccctcaggaggttgtgtcttgtagccagtatgctcaaggctgtgaaggcggcttcccataccttattgcaggaaagtacgcccaagattttgggctggtggaagaagcttgcttcccctacacaggcactgattctccatgcaaaatgaaggaagactgctttcgttattactcctctgagtaccactatgtaggaggtttctatggaggctgcaatgaagccctgatgaagcttgagttggtccatcatgggcccatggcagttgcttttgaagtatatgatgacttcctccactacaaaaaggggatctaccaccacactggtctaagagaccctttcaacccctttgagctgactaatcatgctgttctgcttgtgggctatggcactgactcagcctctgggatggattactggattgttaaaaacagctggggcaccggctggggtgagaatggctacttccggatccgcagaggaactgatgagtgtgcaattgagagcatagcagtggcagccacaccaattcctaaattgtagggtatgccttccagtatttcataatgatctgcatcagttgtaaaggggaattggtatattcacagactgtagactttcagcagcaatctcagaagcttacaaatagatttccatgaagatatttgtcttcagaattaaaactgcccttaattttaatatacctttcaatcggccactggccatttttttctaagtattcaattaagtgggaattttctggaagatggtcagctatgaagtaatagagtttgcttaatcatttgtaattcaaacatgctatattttttaaaatcaatgtgaaaacatagacttatttttaaattgtaccaatcacaagaaaataatggcaataattatcaaaacttttaaaatagatgctcatatttttaaaataaagttttaaaaataactgc

SEQ ID NO: 123 - DNA, 1062 bp, Homo sapiens
agcccaagaaacatctcaccaatttcaaatctgatctattcggcttagcgactgaagattgacgctgcccgatcgcctcggaagtcccctggaccatcacagaagccgagcttcgggtaactctcacagtggagggtaagtccatcccctgtttaatcgatacgggggctacccactccacgttgccttcttttcaagggcctgtttcccttgcccccataactgttgtgggtattgacggccaagcttcaaaacccctgaaaactcccccactctggtgccaacttggacaacactcttttatgcactcttttttagttatccccacctgcccacttcccttattaggccgaaatattttaaccaaattatctgcttccctgactattcctggagtacagctacatctcattgctgcccttcttcccaatccaaagcctcctttgtgtcctctaacatccccacaatatcagcccttaccacaagacctcccttcagcttaatctctcccactctaggttcccacgccgcccctaatcccacttgaagcagccctgagaaacatcgcccattctctctccataccaccccccaaaaattttcgccgctccaacacttcaacactattttgttttatttgtcttattaatatcagaaggcaggaatgtcaggcctctgagcccaggccaggccatcgcatcccctgtgacttgcacgtatacatccagatggcctgaagtaactgaagatccacaaaagaagtaaaaacagccttaactgatgacattccaccattgtgatttgttcctgccccaccctaactgatcaatgtactttgtaatctcccccacccttaagaaggttctttgtaattctccccacccttgagaatgtactttgtgagatccacccctgcccaccagagaacaaccccctttgattgtaattttttattaccttcccaaatcctataaaacagccccacccctatcttccttcactgactctcttttcggactcagccaccggcacccaggtgaaataaacagctttattgctcac

SEQ ID NO: 124 - DNA, 2647 bp, Homo sapiens
gggccggagttcctgcagagggagcgtcaaggccctgtgctgctgtccctgggggccagaggggttgcccagcatgcccactggcaggagagagggaactgacccacttgctcctaccagcttctgaaggctccaaagtccggagtgcagaaagccaggaccaagagacaggcagctcaccagggtggacaaatcgccagagatgtggtgcattgtcctgttttcacttttggcatgggtttatgctgagcctaccatgtatggggagatcctgtcccctaactatcctcaggcatatcccagtgaggtagagaaatcttgggacatagaagttcctgaagggtatgggattcacctctacttcacccatctggacattgagctgtcagagaactgtgcgtatgactcagtgcagataatctcaggagacactgaagaagggaggctctgtggacagaggagcagtaacaatccccactctccaattgtggaagagttccaagtcccatacaacaaactccaggtgatctttaagtcagacttttccaatgaagagcgttttacggggtttgctgcatactatgttgccacagacataaatgaatgcacagattttgtagatgtcccttgtagccacttctgcaacaatttcattggtggttacttctgctcctgccccccggaatatttcctccatgatgacatgaagaattgcggagttaattgcagtggggatgtattcactgcactgattggggagattgcaagtcccaattatcccaaaccatatccagagaactcaaggtgtgaataccagatccggttggagaaagggttccaagtggtggtgaccttgcggagagaagattttgatgtggaagcagctgactcagcgggaaactgccttgacagtttagtttttgttgcaggagatcggcaatttggtccttactgtggtcatggattccctgggcctctaaatattgaaaccaagagtaatgctcttgatatcatcttccaaactgatctaacagggcaaaaaaagggctggaaacttcgctatcatggagatccaatgccctgccctaaggaagacactcccaattctgtttgggagcctgcgaaggcaaaatatgtctttagagatgtggtgcagataacctgtctggatgggtttgaagttgtggagggacgtgttggtgcaacatctttctattcgacttgtcaaagcaatggaaagtggagtaattccaaactgaaatgtcaacctgtggactgtggcattcctgaatccattgagaatggtaaagttgaagacccagagagcactttgtttggttctgtcatccgctacacttgtgaggagccatattactacatggaaaatggaggaggtggggagtatcactgtgctggtaacgggagctgggtgaatgaggtgctgggcccggagctgccgaaatgtgttccagtctgtggagtccccagagaaccctttgaagaaaaacagaggataattggaggatccgatgcagatattaaaaacttcccctggcaagtcttctttgacaacccatgggctggtggagcgctcattaatgagtactgggtgctgacggctgctcatgttgtggagggaaacagggagccaacaatgtatgttgggtccacctcagtgcagacctcacggctggcaaaatccaagatgctcactcctgagcatgtgtttattcatccgggatggaagctgctggaagtcccagaaggacgaaccaattttgataatgacattgcactggtgcggctgaaagacccagtgaaaatgggacccaccgtctctcccatctgcctaccaggcacctcttccgactacaacctcatggatggggacctgggactgatctcaggctggggccgaacagagaagagagatcgtgctgttcgcctcaaggcggcaaggttacctgtagctcctttaagaaaatgcaaagaagtgaaagtggagaaacccacagcagatgcagaggcctatgttttcactcctaacatgatctgtgctggaggagagaagggcatggatagctgtaaaggggacagtggtggggcctttgctgtacaggatcccaatgacaagaccaaattctacgcagctggcctggtgtcctgggggccccagtgtgggacctatgggctctacacacgggtaaagaactatgttgactggataatgaagactatgcaggaaaatagcaccccccgtgaggactaatccagatacatcccaccagcctctccaagggtggtgaccaatgcattaccttctgttccttatgatattctcattatttcatcatgactgaaagaagacacgagcgaatgatttaaatagaacttgattgttgagacgccttgctagaggtagagtttgatcatagaattgtgctggtcatacatttgtggtctgactccttggggtcctttccccggagtacctattgtagataacactatgggtggggcactcctttcttgcactattccacagggataccttaattctttgtttcctctttacctgttcaaaattccatttacttgatcattctcagtatccactgtctatgtacaataaaggatgtttataagc

SEQ ID NO: 125 - DNA, 1156 bp, Homo sapiens
ggcacgaggaagagcggtcggcggggtttcttcgttgcattgcctgagaggagcggagtctgccaggtggtgtccatcatgttctctttcaacatgttcgaccaccctattcccagggtcttccaaaaccgcttctccacacagtaccgctgcttctctgtgtccatgctagcatggcctaatgacaggtcagatgtggagaaaggagggaagataattatgccaccctcggccctggaccaactcagccgacttaacattacctatcccatgctgttcaaactgaccaataagaattcggaccgcatgacgcattgtggcgtgctggaatttgtggctgatgaaggcatctgctacctcccacactggatgatgcagaacttactcttggaagaagacggcctggtccagttggagaccgtcaaccttcaagtggccacctactccaagagtaagttctgctacctcccacactggatgatgcagaacttactcttggaagaaggcggcctggtccaggtggagagcgtcaaccttcaagtggccacctactccaaattccaacctcagagcgctgacttcctggacatcaccaaccccaaagccgtattagaaaacgcacttaggaactttgcctgtctgaccaccggggatgtgattgccattaactacaatgaaaagatctacgaactgcgtgtgatggagaccaaacccgacaaggcagtgtccattcatgagtgtgacatgaacgtggactttgatgctcccctgggctacaaagaacccgaaagacaagtccagcatgaggagtcgacagaaggtgaagccgaccacagtggctatgctggagagcttggcttccgcgctttctctggatctggcaatagactggatggaaagaagaaaggggtagagcccagcccctccccaatcaagcctggagatattaaaagaggaattcccaattatgaatttaaacttggtaagataactttcatcagaaattcacgtccccttgtcaaaaaggttgaagaggatgaagctggaggcagattcgtcgctttctctggagaaggacagtcattgcgtaaaaagggaagaaagccctaagtgaggactgttggctgattggaaaataataaaagtttcatttgca

SEQ ID NO: 126 - DNA, 1748 bp, Homo sapiens
aagaggagaggcataaatttaggatctcacccttcattccacagacacacacagcctctctgcccacctctgcttcctctaggaacacaggagttccagatcacatcgagttcaccatgaattcactcagtgaagccaacaccaagttcatgttcgatctgttccaacagttcagaaaatcaaaagagaacaacatcttctattcccctatcagcatcacatcagcattagggatggtcctcttaggagccaaagacaacactgcacaacaaattagcaaggttcttcactttgatcaagtcacagagaacaccacagaaaaagctgcaacatatcatgttgataggtcaggaaatgttcatcaccagtttcaaaagcttctgactgaattcaacaaatccactgatgcatatgagctgaagatcgccaacaagctcttcggagaaaagacgtatcaatttttacaggaatatttagatgccatcaagaaattttaccagaccagtgtggaatctactgattttgcaaatgctccagaagaaagtcgaaagaagattaactcctgggtggaaagtcaaacgaatgaaaaaattaaaaacctatttcctgatgggactattggcaatgatacgacactggttcttgtgaacgcaatctatttcaaagggcagtgggagaataaatttaaaaaagaaaacactaaagaggaaaaattttggccaaacaagaatacatacaaatctgtacagatgatgaggcaatacaattcctttaattttgccttgctggaggatgtacaggccaaggtcctggaaataccatacaaaggcaaagatctaagcatgattgtgctgctgccaaatgaaatcgatggtctgcagaagcttgaagagaaactcactgctgagaaattgatggaatggacaagtttgcagaatatgagagagacatgtgtcgatttacacttacctcggttcaaaatggaagagagctatgacctcaaggacacgttgagaaccatgggaatggtgaatatcttcaatggggatgcagacctctcaggcatgacctggagccacggtctctcagtatctaaagtcctacacaaggcctttgtggaggtcactgaggagggagtggaagctgcagctgccaccgctgtagtagtagtcgaattatcatctccttcaactaatgaagagttctgttgtaatcaccctttcctattcttcataaggcaaaataagaccaacagcatcctcttctatggcagattctcatccccatagatgcaattagtctgtcactccatttagaaaatgttcacctagaggtgttctggtaaactgattgctggcaacaacagattctcttggctcatatttcttttctatctcatcttgatgatgatagtcatcatcaagaatttaatgattaaaatagcatgcctttctctctttctcttaataagcccacatataaatgtacttttccttccagaaaaatttcccttgaggaaaaatgtccaagataagatgaatcatttaataccgtgtcttctaaatttgaaatataattctgtttctgacctgttttaaatgaaccaaaccaaatcatactttctcttcaaatttagcaacctagaaacacacatttctttgaatttaggtgatacctaaatccttcttatgtttctaaattttgtgattctataaaacacatcatcaataaaataatgacataaaatc

SEQ ID NO: 127 - DNA, 1623 bp, Homo sapiens
gttgtaacaaaaccgctcaagtctgccttaaagagccttacaagccagccagtccctgcagctccacaaactgacccatcctgggccttgttctccacagaatgggtctgctccttcccctggcactctgcatcctagtcctgtgctgcggcaaattgtctccaccccagctggccctcaacccctcggctctgctctcccggggctgcaatgactccgatgtgctggcagttgcaggctttgccctgcgggatattaacaaagacagaaaggatggctatgtgctgagactcaaccgagtgaacgacgcccaggaatacagacggggtggcctgggatctctgttctatcttacactggatgtgctagagactgactgccatgtgctcagaaagaaggcatggcaagactgtggaatgaggatattttttgaatcagtttatggtcaatgcaaagcaatattttatatgaacaacccaagtagagttctctatttagctgcttataactgtactcttcgcccagtttcaaaaaaaaagatttacatgacgtgccctgactgcccaagctccatacccactgactcttccaatcaccaagtgctggaggctgccaccgagtctcttgcgaaatacaacaatgagaacacatccaagcagtattctctcttcaaagtcaccagggcttctagccagtgggttgtcggcccttcttacttcgtggaatatttaattaaagaatcaccatgtactaaatcccaggccagcagctgttcacttcagtcctccgactctgtgcctgttggtctttgcaaaggttctctgactcgaacacactgggaaaagtttgtctctgtgacttgtgacttctttgaatcacaggctccagccactggaagtgaaaactctgctgttaaccagaaacctacaaaccttcccaaggtggaagaatcccagcagaaaaacacccccccaacagactccccctccaaagctgggccaagaggatctgtccaatatcttcctgacttggatgataaaaattcccaggaaaagggccctcaggaggcctttcctgtgcatctggacctaaccacgaatccccagggagaaaccctggatatttccttcctcttcctggagcctatggaggagaagctggtggtcctgcctttccccaaagaaaaagcacgcactgctgagtgcccagggccagcccagaatgccagccctcttgtccttccgccatgagaatcacacagagtcttctgtaggggtatggtgcgccgcatgacatgggaggcgatggggacgatggacagagacagagcgtgcacacgtagagtggctagtgaaggacgcctttttgactcttcttggtctcagcatgttgactgggattggaaataatgagactgaccctcggcttgggctgcactctaccctgtacactgccttgtaccctgagctgcatcacctcctaaactgagcagtctcataccatggagagatgcctctcttatgtcttcagccactcacttataaagatacttatcttttcagcagtatatatgtgctgaaatctcagcatgaaagcattgcatgagtaaagatactttcccta

SEQ ID NO: 128 - DNA, 1465 bp, Homo sapiens
gaattcgggtctcgagcaggaagtaccaagggaggatggagatggtaataatcagggttgggtggagaatatctgaggaaactgcacttgatttgggccttgaagagtaattgactggatttagatttatctagaaaggtcgttcccagcagaagcaacaagaacaacaagcttggaggtctgccatcatggatgttctcgcagaagcaaatggcacctttgccttaaaccttttgaaaacgctgggtaaagacaactcgaagaatgtgtttttctcacccatgagcatgtcctgtgccctggccatggtctacatgggggcaaagggaaacaccgctgcacagatggcccagatactttctttcaataaaagtggcggtggtggagacatccaccagggcttccagtctcttctcaccgaagtgaacaagactggcacgcagtacttgcttagggtggccaacaggctctttggggaaaagtcttgtgatttcctctcatcttttagagattcctgccaaaaattctaccaagcagagatggaggagcttgactttatcagcgccgtagagaagtccagaaaacacataaacacctgggtagctgaaaagacagaaggtaaaattgcggagttgctctctccgggctcagtggatccattgacaaggctggttctggtgaatgctgtctatttcagaggaaactgggatgaacagtttgacaaggagaacaccgaggagagactgtttaaagtcagcaagaatgaggagaaacctgtgcaaatgatgtttaagcaatctacttttaagaagacctatataggagaaatatttacccaaatcttggtgcttccatatgttggcaaggaactgaatatgatcatcatgcttccggacgagaccactgacttgagaacggtggagaaagaactcacttacgagaagttcgtagaatggacgaggctggacatgatggatgaagaggaggtggaagtgtccctcccgcggtttaaactagaggaaagctacgacatggagagtgtcctgcgcaacctgggcatgactgatgccttcgagctgggcaaggcagacttctctggaatgtcccagacagacctgtctctgtccaaggtcgtgcacaagtcttttgtggaggtcaatgaggaaggcacggaggctgcagccgccacagctgccatcatgatgatgcggtgtgccagattcgtcccccgcttctgcgccgaccaccccttccttttcttcatccagcacagcaagaccaacgggattctcttctgcggccgcttttcctctccgtgaggacagggcagtcttggtgtgcagcccctctcctctctgtcccctgacactccacagtgtgcctgcaacccaagtggccttatccgtgcagtggtggcagttcagaaataaagggcccatttgtgggatgccgcattaaaaaaaaa

SEQ ID NO: 129 - DNA, 1900 bp, Homo sapiens
acaactctcagaggagcattgcccgtcagacagcaactcagagaataaccagagaacaaccagattgaaacaatggaggatctttgtgtggcaaacacactctttgccctcaatttattcaagcatctggcaaaagcaagccccacccagaacctcttcctctccccatggagcatctcgtccaccatggccatggtctacatgggctccaggggcagcaccgaagaccagatggccaaggtgcttcagtttaatgaagtgggagccaatgcagttacccccatgactccagagaactttaccagctgtgggttcatgcagcagatccagaagggtagttatcctgatgcgattttgcaggcacaagctgcagataaaatccattcatccttccgctctctcagctctgcaatcaatgcatccacagggaattatttactggaaagtgtcaataagctgtttggtgagaagtctgcgagcttccgggaagaatatattcgactctgtcagaaatattactcctcagaaccccaggcagtagacttcctagaatgtgcagaagaagctagaaaaaagattaattcctgggtcaagactcaaaccaaaggcaaaatcccaaacttgttacctgaaggttctgtagatggggataccaggatggtcctggtgaatgctgtctacttcaaaggaaagtggaaaactccatttgagaagaaactaaatgggctttatcctttccgtgtaaactcggctcagcgcacacctgtacagatgatgtacttgcgtgaaaagctaaacattggatacatagaagacctaaaggctcagattctagaactcccatatgctggagatgttagcatgttcttgttgcttccagatgaaattgccgatgtgtccactggcttggagctgctggaaagtgaaataacctatgacaaactcaacaagtggaccagcaaagacaaaatggctgaagatgaagttgaggtatacataccccagttcaaattagaagagcattatgaactcagatccattctgagaagcatgggcatggaggacgccttcaacaagggacgggccaatttctcagggatgtcggagaggaatgacctgtttctttctgaagtgttccaccaagccatggtggatgtgaatgaggagggcactgaagcagccgctggcacaggaggtgttatgacagggagaactggacatggaggcccacagtttgtggcagatcatccttttctttttcttattatgcataagataaccaactgcattttatttttcggcagattttcctcaccctaaaactaagcgtgctgcttctgcaaaagatttttgtagatgagctgtgtgcctcagaattgctatttcaaattgccaaaaatttagagatgttttctacatatttctgctcttctgaacaacttctgctacccactaaataaaaacacagaaataattagacaattgtctattataacatgacaaccctattaatcatttggtcttctaaaatgggatcatgcccatttagattttccttactatcagtttatttttataacattaacttttactttgttatttattattttatataatggtgagtttttaaattattgctcactgcctatttaatgtagctaataaagttatagaagcagatgatctgttaatttcctatctaataaatgcctttaattgttctcataatgaagaataagtaggtaccctccatgcccttctgtaataaatatctggaaaaaacattaaacaataggcaaatatatgttatgtgcatttctagaaatacataacacatatatatgtctgtatcttatattcaattgcaagtatataataaataaacctgcttccaaacaac

SEQ ID NO: 130 - DNA, 741 bp, Homo sapiens
gagaaatttttcattttctttcttgtttgactgtatgcaaacatcaaactaagaatggcaaagatgaatctctcttcctatatattaatactaactttttctttgttttctcaaggtattttactttcagcatccaagtccataagaaatttagatgatgacatggtatttaatacattcaggttggggaaaggctttcagaaggaagacactgcagaaaaatcagttattgctccttccctggaacaatataaaaatgatgagagcagtttcatgaacgaagaggaaaataaagtttcaaagaacacaggctccaaacataatttcttaaatcatggtctgccactcaatctggctataaaaggatatcaagcactaaaaggatctgtagatttcccagctgagaatggagttcagaatactgaatcaacacaagaaaagagagaaattggggatgaagaaaactcagctaaatttcctataggaaggagagattttgacatgctcagatgtatgctcggaagagtctaccgaccctgttggcaagtctgatacctgttggtccacatcatcttttcagaagaaaataaaagcatttaattgccaatgggaggagaagcccatactgctactataacttgtgtatgttaaatgtctgttttaaaagaaagtagtgttaaatgtatcagtaactgaaatgatatgctttctctgtgcattaaatttgtgaaaattctgcat

SEQ ID NO: 131 - DNA, 5021 bp, Homo sapiens
cccgggggggagagagccggcaggcggcggcggtggtggcgggggcgatgcgccgcgcccggccgcgctaggtgagccggcaccgggagcgcgggccgcggccatgggcaccctgggcaaggcgagagaggctccgcggaaaccttcccatggctgcagagctgcctctaaagcaagactagaggcaaagccagccaacagccccttcccctcccatcccagcttggcccacatcacccagttccgaatgatggtgtctctgggacatttagccaaaggagccagcctggacgatctcattgacagctgcattcaatcttttgatgcagatggaaacctgtgtcgaagtaaccaactgttgcaagtcatgctgaccatgcaccgaattgtcatctcctctgcagaactgctccaaaaagttatcaccctctataaggatgctttggcaaagaattcaccaggactttgcctgaagatctgttattttgtaaggtattggataacagaattctgggtcatgtttaaaatggacgccagcttgacagacactatggaggagtttcaggaactggtgaaagctaagggtgaggagttacattgccgcctgattgacacaactcaaatcaatgcccgtgactggtccaggaaacttactcaaaggataaaatcaaataccagcaagaaacggaaagtctccctgctctttgaccatctggaaccagaagagctatccgagcacctcacctaccttgagttcaagtctttccggaggatatcgttctctgattatcagaattaccttgtaaatagctgtgtgaaggaaaaccccaccatggagcgatctattgctctgtgcaacggcatctcccagtgggtacaactgatggttctcagccgccccacgccgcagctccgagcagaagtcttcatcaagttcatccaggtggctcagaagctccaccaactacagaacttcaatacactgatggctgtgataggtgggctgtgtcacagctcaatctcgaggctcaaggagacaagttcgcatgtcccacatgaaatcaataaggttctcggtgagatgactgagctgctgtcctcctccagaaactacgacaattaccggcgagcctatggagagtgcaccgacttcaagatccccattctgggtgtgcatctcaaggacctcatctccctgtatgaagccatgcctgactatctgggggacgggaaagtgaacgtccataagctactggccctatacaatcatatcagtgaattggtccagctgcaagaggtggccccacccttggaggctaacaaggacttggtacacttgctgacgttatccctggatctttactacactgaggatgaaatctatgagctttcctatgcccgggaaccaaggaaccacagagctccaccactaacaccttcaaagccaccagtagtagtggactgggcttctggagtgtctcccaaacctgatccaaaaaccattagcaaacacgtccagaggatggtggattctgtcttcaagaactatgatcacgaccaggatggatacatttctcaggaagaatttgaaaagattgctgcgagttttccattttccttctgtgtgatggacaaagacagggaaggcctcatcagcagggatgagatcacagcctacttcatgagagccagctcaatctattccaagctgggcctgggctttcctcacaacttccaagagaccacctacctgaagcccactttttgtgacaactgtgctggatttctctggggagtgatcaaacaaggatatcgatgtaaagactgcgggatgaactgtcacaaacaatgcaaagatctggttgtgtttgagtgtaagaagcgagccaagaacccagtagctcccacagagaacaacacttctgtggggccagtgtccaacctttgctcattgggagccaaagatctgctccatgcacctgaggaaggaccttttacattccctaatggggaggctgtggaacatggtgaggagagtaaggatcggaccatcatgctgatgggagtgtcctcacagaagatttctcttcggctgaagagggctgttgcccacaaggccacccagactgaatcacagccttggattggcagtgagggcccttcaggtccctttgtgctgtcttccccaaggaagacagcccaggatactctatatgtgcttcccagtcccacctctccatgtcctagcccagtcttggtcagaaagcgggcttttgtcaagtgggagaataaagactccctcataaaatcaaaggaggagctccgtcacctcagactgcctacctaccaagaactggaacaggaaataaatactctgaaagcagataatgatgccctaaagatccaactgaaatatgcacagaagaaaatagaatccctccagcttgaaaaaagcaatcatgtcttagctcaaatggagcagggtgactgttcttagcccagaaactaagtagcacaatctgtagatgagtatagtgatctcatttcctaaactgtaatgcacagacctgaggaactttacactgaccagctttaaaacagtactttaaaaggaaaagcctgttactgtttatttacctaaaagattcctaatgtgcagcactgttttctctttcagttagttgactcaaagggggaaaactaaagaatgcaaaacttttgctattcataccactgatgttcatcaaaagtatgcgatctaaaacatgactatcatttcctgacaatggggcatctcggtggcctgcctggctgattcttccttaaaactaaaatctctggaaaatggatttgcttcttaccctgtgttttctgcaaactgacttactttgttccagccaaagcttgctaataatagaaaactacccatattccaaaagtagatttcctctgtatcccagcatactttgtgaacctggctccttcttcactacctcagatctaatcaattagtccatgtaccctccttcctcactacagtcataacacatgagcatatctacctagaagccaatttctactgatgtagccacaactttttagaggcctattaaacatgacgttatccaattgcaggtcaacttatagttgtagccttacaacttacaggcatcagaaaataagtaatcaaattaggtacctggaaacatagctattaccatctcatattactgtctaattaaaataaacataacgcaaacatgtttgtccttatatattctacagtggatagaattaggaattgatggcttaaaaaaaaaagtctatgaagagtctgtttaactcttcatgttccatctttctcttctgaagtaaactattttgaaagttctctttttgaaatgaatttgtgcttaactgtcttcactattaatactatttagaaataagctaattggatcagtggcttaaataatagctgactgtgtgtacatatgtatataatatgtatatacaatatcaggcatgcatgtggcttggaattttgtttcctccataaaatgtggaagtgaattaaacaagttttagtcatttatacaaagtcacaaatataaagttcagtttgtcacaagattaaattgctcacaaggtaaaattgtattgtttggcaaaatcacaagtaacaatcctgtgagttttctattatgaaggttaataataaatgggctcatttagttgcctgggcacctattcacaaattcatttgtcagcctctttttagttctcttaaaaaaaaaaaaatcatatgatcattttcctttttgggggtacttagcttccatgcctataaagtctggtaccagactgacttgaaattcataaacaagttgtccaattgccaagaatatgttaacaattaaaagttccaaactaaagccaatagcaccaagtcttcataagaatacaaagtatacatacagtattgcttacctggaggattcagatcatttaggaattctctttgatgaaagatcagttcccatttgagttcctccttgcactgagttttagtgatatagaactagcttgtagttagtgtttcattacattataaagaatagttttacacacgtatttaccgttttccaaatttaaactcagaaatacccaaagcaggcctgcttaagcccactacctggcatataaacttatagtaacactttgttactttctttttaataggacaagcatgagttaggacaaactctaaaaattcatattcttcactattcttgttttcctttgattgatatagaccaaagatggtgtactctaattttttaaaacagtaatggaacacaatttttttcattcttcctcctctccattcgaagtaaagatccccagttagtttttatataaataatctatagggattcaaaaggtgtcacagtccacttaattagtcaaattagcaatggctaaacagtatcaagtactgcagaatttatcactgaaatggataagaggaaatagtttagtcacaggtttttacagtccagcaagggccaaagaggtatagtatacaagttaatagtatttgtgttgagcaacatggggctagtgggatcacagaaatctggaaaaaaaaaaaaaaaggctttggcttatcaagcctagtgtaaatttctgcatctcacacgactttagtttggccaggtatttatctgccaaaacaaggacaaatcttgttgtattaacagcagggtcacttctcattttctttgctgacttacctttttactgaccgttgtgaatttctgtctcaaaatgtataatatagaaatgcaagaaaaaaacaaatgtacagattgtaaagttttttgatacctaatgtaagttttctttgtgtaatatttatatgataaaagacattaggatccctacaaaaaaaaaaaaaaaaaaaaaaaaaaaaaaaaaaaaaaaaaaaaaaaaaaaaaaaaaaaaaaaaaaaaaaaaaa

SEQ ID NO: 132 - DNA, 2787 bp, Homo sapiens
agagcggaggccgcactccagcactgcgcagggaccgccttggaccgcagttgccggccaggaatcccagtgtcacggtggacacgcctccctcgcgcccttgccgcccacctgctcacccagctcaggggctttggaattctgtggccacactgcgaggagatcggttctgggtcggaggctacaggaagactcccactccctgaaatctggagtgaagaacgccgccatccagccaccattccaaggaggtgcaggagaacagctctgtgataccatttaacttgttgacattacttttatttgaaggaacgtatattagagcttactttgcaaagaaggaagatggttgtttccgaagtggacatcgcaaaagctgatccagctgctgcatcccaccctctattactgaatggagatgctactgtggcccagaaaaatccaggctcggtggctgagaacaacctgtgcagccagtatgaggagaaggtgcgcccctgcatcgacctcattgactccctgcgggctctaggtgtggagcaggacctggccctgccagccatcgccgtcatcggggaccagagctcgggcaagagctccgtgttggaggcactgtcaggagttgcccttcccagaggcagcgggatcgtgaccagatgcccgctggtgctgaaactgaagaaacttgtgaacgaagataagtggagaggcaaggtcagttaccaggactacgagattgagatttcggatgcttcagaggtagaaaaggaaattaataaagcccagaatgccatcgccggggaaggaatgggaatcagtcatgagctaatcaccctggagatcagctcccgagatgtcccggatctgactctaatagaccttcctggcataaccagagtggctgtgggcaatcagcctgctgacattgggtataagatcaagacactcatcaagaagtacatccagaggcaggagacaatcagcctggtggtggtccccagtaatgtggacatcgccaccacagaggctctcagcatggcccaggaggtggaccccgagggagacaggaccatcggaatcttgacgaagcctgatctggtggacaaaggaactgaagacaaggttgtggacgtggtgcggaacctcgtgttccacctgaagaagggttacatgattgtcaagtgccggggccagcaggagatccaggaccagctgagcctgtccgaagccctgcagagagagaagatcttctttgagaaccacccatatttcagggatctgctggaggaaggaaaggccacggttccctgcctggcagaaaaacttaccagcgagctcatcacacatatctgtaaatctctgcccctgttagaaaatcaaatcaaggagactcaccagagaataacagaggagctacaaaagtatggtgtcgacataccggaagacgaaaatgaaaaaatgttcttcctgatagataaaattaatgcctttaatcaggacatcactgctctcatgcaaggagaggaaactgtaggggaggaagacattcggctgtttaccagactccgacacgagttccacaaatggagtacaataattgaaaacaattttcaagaaggccataaaattttgagtagaaaaatccagaaatttgaaaatcagtatcgtggtagagagctgccaggctttgtgaattacaggacatttgagacaatcgtgaaacagcaaatcaaggcactggaagagccggctgtggatatgctacacaccgtgacggatatggtccggcttgctttcacagatgtttcgataaaaaattttgaagagttttttaacctccacagaaccgccaagtccaaaattgaagacattagagcagaacaagagagagaaggtgagaagctgatccgcctccacttccagatggaacagattgtctactgccaggaccaggtatacaggggtgcattgcagaaggtcagagagaaggagctggaagaagaaaagaagaagaaatcctgggattttggggctttccagtccagctcggcaacagactcttccatggaggagatctttcagcacctgatggcctatcaccaggaggccagcaagcgcatctccagccacatccctttgatcatccagttcttcatgctccagacgtacggccagcagcttcagaaggccatgctgcagctcctgcaggacaaggacacctacagctggctcctgaaggagcggagcgacaccagcgacaagcggaagttcctgaaggagcggcttgcacggctgacgcaggctcggcgccggcttgcccagttccccggttaaccacactctgtccagccccgtagacgtgcacgcacactgtctgcccccgttcccgggtagccactggactgacgacttgagtgctcagtagtcagactggatagtccgtctctgcttatccgttagccgtggtgatttagcaggaagctgtgagagcagtttggtttctagcatgaagacagagccccaccctcagatgcacatgagctggcgggattgaaggatgctgtcttcgtactgggaaagggattttcagccctcagaatcgctccaccttgcagctctccccttctctgtattcctagaaactgacacatgctgaacatcacagcttatttcctcatttttataatgtcccttcacaaacccagtgttttaggagcatgagtgccgtgtgtgtgcgtcctgtcggagccctgtctcctctctctgtaataaactcatttctagcag

SEQ ID NO: 133 - DNA, 1285 bp, Homo sapiens
gggctgcctgtgacgcgcggcgcggtcggtcctgcctgtaacggcggcggcggctgctgctccagacacctgcggcggcggcggcgaccccgcggcgggcgcggagatgtggcccctggtagcggcgctgttgctgggctcggcgtgctgcggatcagctcagctactatttaataaaacaaaatctgtagaattcacgttttgtaatgacactgtcgtcattccatgctttgttactaatatggaggcacaaaacactactgaagtatacgtaaagtggaaatttaaaggaagagatatttacacctttgatggagctctaaacaagtccactgtccccactgactttagtagtgcaaaaattgaagtctcacaattactaaaaggagatgcctctttgaagatggataagagtgatgctgtctcacacacaggaaactacacttgtgaagtaacagaattaaccagagaaggtgaaacgatcatcgagctaaaatatcgtgttgtttcatggttttctccaaatgaaaatattcttattgttattttcccaatttttgctatactcctgttctggggacagtttggtattaaaacacttaaatatagatccggtggtatggatgagaaaacaattgctttacttgttgctggactagtgatcactgtcattgtcattgttggagccattcttttcgtcccaggtgaatattcattaaagaatgctactggccttggtttaattgtgacttctacagggatattaatattacttcactactatgtgtttagtacagcgattggattaacctccttcgtcattgccatattggttattcaggtgatagcctatatcctcgctgtggttggactgagtctctgtattgcggcgtgtataccaatgcatggccctcttctgatttcaggtttgagtatcttagctctagcacaattacttggactagtttatatgaaatttgtggcttccaatcagaagactatacaacctcctaggaaagctgtagaggaaccccttaatgcattcaaagaatcaaaaggaatgatgaatgatgaataactgaagtgaagtgatggactccgatttggagagtagtaagacgtgaaaggaatacacttctgtttaagcaccatggccttgatgattcactgttggggagaagaaacaagaaaagtaactggttgtcacctatgagacccttacgtgattgttagttaagtttttattcaaagcagctgtaatttagttaataaaataattatgatc

SEQ ID NO: 134 - DNA, 117143 bp, Homo sapiens
acggggtctcgaaaaaaggagaatgggatgagaaggatatatgggtagtgtcattttttaacttgcagatttcatcctagtcttccagttatcgtttcctagcactccatgttcccaagatagtgtcaccaccccaaggactctctctcattttctttgcctgggccctctttctactgaggagtcgtggccttccatcagtagaagccggatgttcttgtgtccgaaattggtgggttcttggtctcactgacttcaagaatgaagttgcggaccctcacggtgagtggtacagttcttaaagatgatgtgtccagagtttgttccttctgatgttcggacgtgttcagagttacctccttctggtggattcgtggtctcgctggcttcaggagtgaagctgcagacctttgcggtgagtgttacagctcttaaggcggcatgtctggagtttgttcgttcctcccgtctggagttgttcattcctcctggtgggttcgtggtctcgctggcttcaggagtgaagctgcagacctctgcggtcggtgttaccagcagataaatgctatgcggacccaaagagtgagcagcagcaagatttattgcaaagagcacaagaacaaagcttccacagcgtggaaggagaccagagcgggttgctgctgctggctcaggcagcctgcatttttttttttttttttttttttttttgagatggagtctccctctgtcacccaggctggaatgcagtggtgcaatctgggctcactgcaagctccgcctcccgggttcacgccattctcctgcctcaacctccccagtagaggggattacaggcacccaccaccgcacccagctaatattttgtctttttagtagagtcggggtttcactgtgttagccaggatggtctcgatctcttgacctcgtgatccacccctctaggcctcccaaattgctgggattacaggtgtgagccactggcacccagcggggcagcctgcttttattcccttatctgaccccacccacatcctgttgattggtccattttacagagagctaattggtccgttttgacagggtgctgattggtgcatttacaatccctgagctagatatacacagagtgctgattggtgcatttacaatcctctagctagacataaaaattctccaagtccccactacatttgctagacacagagcactgattggtgcgtttacaaacctttagctagacacagagtgctgattggtgcatttgcaaaccttgagctagacacagagcactgattggtgcatttacaatcctttagctagacacagaagttctccaagtgcccaccagattagctagatacagagtgctgattggtgcatccccaaaccccaagctagacacagagtgctgactggtgcatataaaatcctcaggctagacataaaagttttccaagtccccatctgactcaggagcccagctggcttcacctagtggatcctgcgcagggctgtgccgggcgcctgcactcctctcagcccttgggcagtcgatgggaccgggcgctgaggagcagggggcggtgcccgtcggggaggctcaggccacgctggagctcacaggggttgggagggggctcgggcatggcgggctgcaggtcctgagccttgccctgtgcagggcggctggggcccggtgagaattcaagcggggtgcaggcgggccggcagtgctgggggacccggcgcaccctctgcagctgctggcccgggtgctaggcccctgactgcccggggccgggggtgcggggcccgctgagcccgcgcccacctggaactcgcgctggctggcgagcgctgcgcgcagccccagttcccacacccgcctctccctccacacttccccgcaagcagagggagccggctctggcttcggccagcccagagaggggcccccacagcgcagtggcgggctgaagggctcctccagcacggccagaatggacgccaaggccgaggaggcgccgagagcgagcgagggctgctagcacgttgtcacctcgcattctgaaccacagactctccaactctccggcgcttttcgcccactcggtccctcagaacacgaagggctctctcatcctgtcactaaaacgattagctgtccggagacacggaaaaagtcgcccctcttctttgcaggattcctcccttgaacttctccaaaccctcttagtgtgacgtgaccccacccctagctaacccaggctgcttccttaccagcttcccgccccctggggaggcggcaatgcaaagaccgtccgctgccagctctgccgctatctctgtggggtgaatctaacatggcggacaaagacagtaactagtcccgtttctccgcgttttcgccaagaagattggctcttaccacttgtccctcaaaacgaccaccccattgactggtggcgattgcgtcgacggagacggggcaaaagcaagctgaacccgaaaaataacaaacactggggctgaggggtggaactacgagtgcgcagacatgggccagagcgcatttcccctgccccaggcaaattcggcgctcactgcgtccccgcaggccactgaccttacaagactacttgccccagactcctggggctggatgggaattgtagtctccctaaagagttgtacgtatctttttaaggcctagtttctgctttcaaaatacgaaaacataacactccagtccataactgttgacaagtacaagcgcgcacaggtctccaatctatccactggatttccgtgagaattgtgcccgctctggtattggatgttcctctccataagactacagtttctaaggaacactgtggcgaagacctttcattccgcaacgcatgctggaaataattatttccctccacccccccaacaatccttattacttatatttaccgaaactggagacctccattagggcggaaagagtgggggattgggacctcttcttacgactgctttggacaataggtagcgattctgaccttcgtacagcaattactgtgatgcaataagccgcaactggaagagtagaggctagagggcaggcactttatggcaaactcaggtagaattcttcctcttccgtctctttccttttacgtcatccgggggcagactgggtggccaatccagagccccgagagacgcttggctctttctgtccctcccatcctctgattgtaccttgatttcgtattctgagaggctgctgcttagcggtagccccttggtttccgtggcaacggaaaagcgcgggaattacagataaattaaaactgcgactgcgcggcgtgagctcgctgagacttcctggacgggggacaggctgtggggtttctcagataactgggcccctgcgctcaggaggccttcaccctctgctctgggtaaaggtagtagagtcccgggaaagggacagggggcccaagtgatgctctggggtactggcgtgggagagtggatttccgaagctgacagatgggtattctttgacggggggtaggggcggaacctgagaggcgtaaggcgttgtgaaccctggggaggggggcagtttgtaggtcgcgagggaagcgctgaggatcaggaagggggcactgagtgtccgtgggggaatcctcgtgataggaactggaatatgccttgagggggacactatgtctttaaaaacgtcggctggtcatgaggtcaggagttccagaccagcctgaccaacgtggtgaaactccgtctctactaaaaatacaaaaattagccgggcgtggtgccgctccagctactcaggaggctgaggcaggagaatcgctagaacccgggaggcggaggttgcagtgagccgagatcgcgccattgcactccagcctgggcgacagagcgagactgtctcaaaacaaaacaaaacaaaacaaaacaaaaaacaccggctggtatgtatgagaggatgggaccttgtggaagaagaggtgccaggaatatgtctgggaaggggaggagacaggattttgtgggagggagaacttaagaactggatccatttgcgccattgagaaagcgcaagagggaagtagaggagcgtcagtagtaacagatgctgccggcagggatgtgcttgaggaggatccagagatgagagcaggtcactgggaaaggttaggggcggggaggccttgattggtgttggtttggtcgttgttgattttggttttatgcaagaaaaagaaaacaaccagaaacattggagaaagctaaggctaccaccacctacccggtcagtcactcctctgtagctttctctttcttggagaaaggaaaagacccaaggggttggcagcaatatgtgaaaaaattcagaatttatgttgtctaattacaaaaagcaacttctagaatctttaaaaataaaggacgttgtcattagttctttggtttgtattattctaaaaccttccaaatcttaaatttactttattttaaaatgataaaatgaagttgtcattttataaaccttttaaaaagatatatatatatgtttttctaatgtgttaaagttcattggaacagaaagaaatggatttatctgctcttcgcgttgaagaagtacaaaatgtcattaatgctatgcagaaaatcttagagtgtcccatctggtaagtcagcacaagagtgtattaatttgggattcctatgattatctcctatgcaaatgaacagaattgaccttacatactagggaagaaaagacatgtctagtaagattaggctattgtaattgctgatttccttaactgaagaactttaaaaatatagaaaatgattccttgttctccatccactctgcctctcccactcctctccttttcaacacaaatcctgtggtccgggaaagacagggactctgtcttgattggttctgcactggggcaggaatctagtttagattaactggcattttggcttttcttccagctctaaaacaagctccatcacttgaaatggcaaaataaaatcatggatgaggccgagggcggtggcttatgcctgtaatcccagcactttgggaggccaaggtggtaggatcacgaggtcaggagatcgagaccatcctggccaacatggtgaaaccccctctccactaaaaatacaaaaattagctgggcgtagtggcatgtgcctgtaatcccagctactcaggaggctgaggcaggagaatcacttgaaccaggaggcagatgttgctgtgagccaatatggcaccactgaactccagcgacagagctaaactccatcccaaaaaaaaaaaaaaaaaaaaaaaaacatggatgatcggtgtcgttgagaggataggtatttggaagaacctttgtttgaaactggctctgtacatacaatgaaattacatacttatttacatacaatgaaatgcagaggttttttttttatataggatctctgtcgagaggctggagtgcagtggtgctatcacagctcactgcagcctcaacctcgtcaggctcaagcaatcctcccacctcagcctccagagtagcagggacgataggtgtgcaccaccatgcccagctaatttttgtatttttttttctttttttgagatggagtcttgctctgttgcccaggctggagtgcagtggcgcgatctcagctcactgcaaactctgcctcccgggttcatgccattcttctgcctgagcctcctgaatagctgggactacaagcacccactaccacgcccggctaattttttgtatttttttttcttttttagtagaggcgggatttcaccgtgttagccaggatagtcttgatctcctgaccttgtgatccacccgcctgggcctcccaaagtgctaggattacaggcataagccactgcgtccagccattcttgtatttttctgttgtagagatagggttttgctatgttggccatgctggtctcaaactcctgacctcaagtgatctaccctcccttggcctctcaaggtgctgggattacaggcctgagccattgcacccagccatggtctaaaaatcttgattgaaataccaccttttcatttccagacacccctatttaaaattaccacacccccagcacacactttatcttctattcctgctgcttctccataacactgattactagctgacattctatgtaatgtatccattttttatctctagtcccacagaatgtaaactccaggatgggatttttgttttgtttacatacatctgtatgttcagtagttagaacggtacttgggacctagttgccactcaataaacatttgtcaaataaataataaactaaactaaattagttctttaatttttttaaatatggtgatggttagtagtgagtaacattcaaaaaataagttgaaaagttgtaccattgcctcttacccacaataaaaaagggtaaattcttttctgctttatgaaagttgtttttcatatttgaagtcaagttaatcagattaaggaaaatgtatgttgtgttttcagagcgatacaagatttataaataaccatcctctcccttgcccttcaacattatagctaaacaaaaataagaggaaaacaggattcacaatttatcaatttattgaaaatcagagccagagaagcaggaaatgacattgtaggaaaaaactgcttttgaaaaagcacaaaacttactcatgacaatcagtgatcaggaaaatcctcaatagtgtggcatttggatacatttatgtttcatttccatgggagagagtcataaaaataggatgttctttctcattctggcaaattaaaccatcaattaaaaactcagatacataaaaattaaagatgtaagaatgaaaatgctaaattgttattttcaatcaactattatgttttctagcttttcattgcttttttctgtttcctgttaagattaatttctttttttttttttttttttttttttgagacagactttggctcttgttgcccaggctggagtgcagtggcacaatctcggctcactacaacctccacctcccgggttcaagcaattctgctgcctcagcctccggagtacctgggattgcaggcatgtgccatcacaccagctaattttgtatttttagtagagacagggtttctccatattggtcaggttggtctcgaactcctgacctcaggtgatcctcctgccttggcctccgaaagtgctgggattacaggcgtgagccaccgctcccagactttttgttttgttttgttttgtttttttgagacacggtctcgctctgctgcctaggctggagtgcagtggcacgatcttggctcactgccagctccgactcccgggttcaggccattctcctgcctcagcctcccgagtagctgggactacaggcgcccaccactatgcccggctaattttttgtatttttagtagagacggggtttcaccatgttagccaagatggtctcgatctcctgaccttgtgatccacccgcctcagccttccaaagtgctgggattacagtcctgagccactgcgcccggcctggacctttttttttcggggtggggggttggagtctggctctgtcgcccaggctggagtgcagtggcgccatcttggctcactgcaacctccgcctgccaggttcaagttcaagcgcttctcctgcctcagcctcctgagtagctgggattataggcgcacgccaccgtggccggctaattttgtatttttagtagagatagggtttcatcacgttggtcaggctggtcttgaagtcctgatctcgtgatccacccgcctcggccttccaaagtgctggcgtgagccactgcgcctggcttaagattaatttttgtttgttttgtttttgagacggagtctcgctctttcacccaggccggagtgcagtggcgccatctcggctcactgcaagctccgcctcccgggttcacgccattctcctgcctcggccccccaagtagctgggactacaggcgtccaccaccacgcccggctaattttttgtatttttagtagagacggggtttcaccgtgttagccaggatggtctccacttcctgacctcgtgatccgcccacctcggcctcccaaagtgctgggattacaggcgtgagccaccgcgcccggccttaagattaatttttatggtgttttacattcatttgtatggaaagttctaggatagggatcatatttcacttccttttaatatagtacagtatagcacaatttgcagttatgtcttaatatgtgatcaggaatgatcatgactggaaacagtgttatttgtggtagctatagggtaggtaaggttttcagcctgttttaggtttcttgaactaaaattccttctgctgtcttctaagtcaatattggcagctatttctgacaattggtagttctttgtaactttttacctatgactataacatttttgactttcagaagaatttgctaaaatgtgttccccggtgggttgttgtttttcaacctaaacctagctgctttttccagtcacttatccgtattggaagctcaaaatgcaaatatacagtaggcctaaaatattgcctggtttgaaaagtgtttaaaatatttgaatcatttttatagtaaacatttactctcatcaggacctagaaggggaacattttaattttttttcttttcccttttcacagtcttccttcaacattcattacctttttacatatcggagttttcatctgttcaaagtttgtgtttacagtgtgtttatatagtttagattataattaccatactgaaatataattgtttcagaattgagtcagtggtgagaatgaaagccatctggtatgataactgaatccaatttttcttttacggagaatttctttgaaatgtagcttatctcagaaatagggatttagtaaccaatcagagttttctttgtcaaggttgtttttctttttaaagtcacatttggtcccagtaataataccaatgttggtacaagttatctcaggttgtgaagcatttttcccaagtcatctcaggttgtgaagcattttcccaagtagcatttaattttattcttgcaatagcccaaggagtctggcagggtgaatggcaagagaaggaaacaggttcaggtagagtggttagcccaaggtggctctgcttatatacacaactggtagtagaaacccagcctcctgacttagttcattgtttttcttttcactgccctgtgctatgtcaaaaaccccatgattacaagagttgtattacaacccttcacaataaggttactgtccacaagcttttcttgtgatccttttcttttttttttttctttttttgagatggattctctgtcacccaggctggcccgccttggcctcccaaaatgctgggattacagcgtgagccaccgcacctggcccttgtgatccttttctaaaaagttaaatatttaaggaaaaaaccacattcttgtcacactgccaggttagtcgttctttgatatcttgcctggactttatccaaaaaatccgtttcaaaaattcacatttagagctaagtgtagtggctcacgcctgtaatcccggtcgaggcagatggatcacttgaggtcaggacttcaagaccagcctgggcaatatggtgaaaccccttccctaccaaaaatacaaaaaaattagccgggtgtggcagcacgcgcctgtagtcccagctacttggaatgctgaggcacaagaatcacttcaatccgagaggcagaggttgcagtgagccaagaccacaccactgcactccagcctgagcagcagagtgagtgagactccatctccaaaaaaaaaaaaaaaggttcacattcagaagaaagctaaaggccgggtatagtagctcacacctgtaatcccagcactttgggaagccgaagcaggaagattgcttgatgccaggcattcaagaccagcatgggcatcatagtgagatcctgtctctacaaaaattaattaacattaaaaattaaaaagatggctggcatggtggctcactcctgtaatcccagtactttgggaggccaaggcatggtggtgcatgcctttagtcccagctactcgggaggctgaggcaggagaatcacttgaattcaggaggcggaggttacagagagccgagatggtgccactgcactccagcctgggcgacagaacgagactctgtctgaaaaaaaaaaagaaaattaaaaagaccagaataaagctaaagatttaaaatagcctataggttcctaccagaagttaccagctacctctctgatagtctttccctacaatatcctcctggattattacattttagcaccttgacctatctgatgtcctgcatacacaggcatggtcctgctcagggtttgccttctctgctccctctttcttggaatgctcttcccctaattgttgcatagtgtgtttctttacattattaagctatcctctagtctcacctcagtgaaacctttcctgactccccccatgtacatctcacccccacatagatattgaactacctgtttccccttaccctgcttaatttttctctttaatgcacttattcccatgtattctttaattccgtatcaactgtctaccacactagaatatgagctctatgagagcaggctttattttgtaaactgctacatttctatctcctagaatagtacttgaatatagtagtagatacttaataaacacttgttatattagtataataaatgaactaatctcaggaatgccttggttttgtggatagacaggtagggatgggaacttgggtgatgtattttctgaagtttttatttttaagcttattattattttgagatggagtccagctctgtcgcccaggttggagtacagtggcgcgatcttggctcactgcaacgtgcacttccccggttcaagcgattctcctgccttagcctcccaagtagctgggattacaggcgcatgccaccatgcccagttagttttggtatttttagtagagacagcgtttcactgtgttggccaggctggtctcgaaatcctgacctcatgatccgcccgcctcggcctcccaagtgctgggattacaagcatgagcccccgtgtctggccttattttcttttttttgagacagagtcttcctctgtcacctaggctggagtgcagtggcacgatattggctcactctgcaacctccacctccaggattcaagtgatccttctaccttagtctccaaagtagctgagaccacaggcatgccccaccacgcccggctaatttccgtattttaagcgtagacagggtttcaccatattgtccaggatgatctggaactcctgagctcaggtgatccacccacctcagcctcccaaagtgctaggattacaggcatgaggcaccatgcccggccttaagcttatcattttctaaatttcctttagtgagtacttattacactgtttttacaaagtaatcacaaaccaaacatcatgcctcttctgaagtgatctaataagagtacacagtaccatctgtaaagtgttcttgccagaaagttgaacctgaatgattaagcctgtaagtctagtttataggaaataaggctagaggaacaagttaaacctcaccatagggttatacaatcagcaaaatccagaatgggggaaactccacaggtcaaatgacctaattttaaaaataaatgacaagggagaaaaagtaagagacacctatagatcagaagacacttggggctgggcatggtggctcacacctgtaatcccagcactttgggaggccaaggcaggcggatcacctgaggtcaggagttcaagaccagccggccaacatggtgaaccccaactctactaaaattacgaaaaatcagccgggcgtggtggcgcacgcgtgtagttccaactacctgggaggctgaggcaggagaatcacttgaacttgggaggcagaggttgcagtgagccgagatcgcaccattgcatgccagtctgggctacaaaagcaaaaccccatctcaaaaaaaagaagacacttgggtttgggtgtgttggctcatgcctgtaaaccccgtgctgggaggattgcttgagcccaggagttcaaggctgcagtgaggtatgtttgcaccactgcactccagcctaggtgacagagtgtgaccttatcttaaaagtaataataattaaaataatctggggtaggggtggatatgggtgaaacagcttggccatgagttgatggttgttggaccagggtgatggtccatatagttcattttattattttatttacttgaaattttgaaatacttgaaattttccatattaagttaaaaaggcatttacagtaaacaaaaaaaagttctaggaaggaattcaaaagaaatataagcagaaaattttgtctttatggagcttaaagatgagatgtgcacccacagtgatagtgcagaaaaatatatcactggaaatgaattcgtacgaactattatcaactaatcttttaaatgctgatgatagtatagagtattgaagggatcaatataattctgttttgatatctgaaagctcactgaaggtaaggatcgtattctctgctgtattctcagttcctgacacagcagacatttaataaatattgaacgaacttgaggccttatgttgactcagtcataacagctcaaagttgaacttattcactaagaatagctttatttttaaataaattattgagcctcatttattttctttttctccccccctaccctgctagtctggagttgatcaaggaacctgtctccacaaagtgtgaccacatattttgcaagtaagtttgaatgtgttatgtggctccattattagcttttgtttttgtccttcataacccaggaaacacctaactttatagaagctttactttcttcaattaagtgagaacgaaaaatccaactccatttcattctttctcagagagtatatagttatcaaaagttggttgtaatcatagttcctggtaaagttttgacatatattatctttttttttttttttgagacaaagtctcgctctgtcgcccaggctggagtgcagtggcatgatcttggctcactgcaacctccgccccccgagttcaagcgattcttctacctcagcctcccaggtagctgggactacaggcacccgccaccatgcttggctaatttttgtacttttagtagagataaggtttcaccatattggccaggctggtctcgaactcctgaccttgtgatccacctgcctcggcctcccaaagttctgggattacaggcgtgagccaccacacccgactgacatatattatctattaggatgtaacatcattttgaacagtgttttgtattttttgtgtccatcagtgaaagcaaactgcaagcagttttgaaataagcacattgtgtttgagccttcccagtttctcctttctgttcatttctgcatatccttatgcattcccccttctaagggtcagtgtttgcccgctttgtaatcattgtgaagacaggaaaggacctgataccagtttctatttaggccaaaattcatttatagcagtgattcaagttatatttacgtatttgatgatcttgtcttttgaaatgaaaatgtttgtttcttaataaaagaatttcagaaaaagtagagtaggtaatttagtagaacaagtgggctttctccttttctttatgttaagctatggctcacatcttaccttaaatgtcaactaatttgtttttaagtatttatgtacctggtacataacctggtaccaggtacaaactatgtacttggtaaaaagtttattagcacaaaaaggtatatgatgcaaagtatacttccctcttaccctacaacccctgcctccctgttccctccccagacaaccacaatgatcaatttcttatgtatcctttgaggaatttttaaattccagagttcttaacttggggtttatgaatagtctttatgaatttcctagaattatatttaaattgtattcaaaactatggccatgtacatttttctgggaagatagtccataattttcatctgagtgagctaagatcatgccactgcactccagcctgggagacaagagggagactcaaaaaaaaaaaagaaaggcccagtatttactacagagagctaaagattaacctttaaagccctggggctttcaatttatctggatgagaatctttctggaatgaactgtatgttttatggtcagcttgagtaacaaatgctgagcatactatactattattacagggactcaggggcccagtgtggtagctcctgcccataaccccagcactttgggaggccaaggcaggaggatcacttaaggccaggagttcgaagctgtagtgagctatgatcacaccactgcactccagcctagatgacagagtgagaccctgtctttttttttttttgagatggtgtttcactctattgcccaggctggagtgcagtggtgtgatctcggctcactgcaacctccacctcctgggttcaagcgattctcctgcctcagcctcttgagtagctgggattacaggcatctgccaccacacccagctaatttttgtatttttagtcgagacagggttttcaccatgttggccaggctgctctcaaactcctgacttcagctaccttggccttaaaaagtgttgggattacaggtgtaagccaccgcgcctggctgaccctgtctcttaacaaaaaaagagagattaagttatgaatatagttgctttgagaacttgtggaagaaggaaattataggcttataggcagagataataatacgagcaaatgtacaaataaaagaaaatagaggacgggcgcggtggctcacgcctataataccagcactttgggaggtcgaggtgggcggatcacgaggtcaggaaattaagaccatcctggccaaaatggcgaaacactgtctctactaaaacacacaaaaaactagcctggcatggtggcacgtacctgtagtcccagctacttggtaggctgcggcaggggtatcacttgaacctgggaggcagaggttgccctgagccgagatcatgccaatgcactccagcctgacaacagagtgagactctgtctgaaaaaaaagaaaagaaaagaaaatacatccaggaaaaataagctaactttgcatatgtgtataggagttgtgttagaaaaggaagaagccctcaaagatgggaagccatttgcaagaaagagaaggtccaagaggaggcagaagggattggaaatagaaaaaggatgtaagaaagagttgattattactcataaacagtaatgaaggaaaaggagagtaattctacaggaagatgctgaggtgctttgagcccagtgaagttggaggtaaagacagctgttgaggccgggcacggtggctcacgcctctaatcctagcacttttggagcccaaggcaggtggatcacctgaggtcaggagctcaagaccagcctgaccaacatagagaaaccccatctctactaaaaatacaaaattagacgggcgtggaggcgcatgcctgtaatcccagctacttgggaggctgaggcaggagaatcacttgaacctgggaggcggaggttgcagtgagccgagattgcgccattgcactccagcctggccgacaagagtgaaaactgtctcaaaaaaaaaaaacaacaaaaaacagctgttgagattgagaggattagagttggcaactggagaagagtgagaagcttggtttcaagcttgtgatagtcaggattgtgatagtcaggaaagaaccagtcataaagatatatgtgtgtgtatacatataaatatgttatatatatgtgtgtgtgtgacacatatatatttttgtttgtttctttgagacagtgtctccctctgacacccaggctggagttcagtggtgtgatcatagttcacttttaccttgcaatctgggttcaagcaatctctcatctcagcccctcaagtagctaggactacaggtacatggcatttgcccagctaatttttaagtttcttgtagagatgggccagccatattttaaattgtgttttgaatgttatattagaattaaaagtccaaagccgggtgtggtggctcacgcctgtaatcccagcactttgggaggctgaggtgggcggatcacgaggtcaggagttcgagaccagcctggccaatatggtaacaccatctctactaaaaatacaaaaattagctgggtatgggggcacatgcctgtagtcccagctactcaggaggctgaggcagaggaacctcttgaacccaggaggcagaggctgcagtgagttgagatcgtgccactgtactctagcctgggcgacagagcaagattccgtctcaaaaaaaaaaaaagtccagtataatgcccatgtgatagatcgactttttcatgaaatctcttctgtaatatcaatataatctgaataacactttgatctatatgatgagaaagctgggagcctgggagcgatacccccatgcttttgttgtattaattgtattttctacggataaactctaattgctaaaaataaaacaactttattgacccaagcaagcctaaagttctgaaatcttttttttatttttgtttgtttgtttgtttgtttttgtttgttttgttttgagacggagtctcgctctgtcgcccaggctggagtgcggtggtgcagtctcggctcactgcaagctccacctcccgggttcacaccattctcctgcctcagcctcccaagtagctgggactacagacgcctgccaccacgcccagctaatttttttgtatttttagtagagaaagggtttcaccgtgttagccaggatggtctcgatctcctgacctcgtgatctgcccgccttggcctccctaagttctgggattacaagtgtgagccaccacgcccggctgtttttttttgttttgttttgagacggagtctcactgtgttgcccagactggagtgcagtggcatgatctcagctcactgccacctccatctcctgggttcaagcaaatctcctgcctcagcctcccgagtagctgggactacaggcatgtgccaccacacctggctaatttttgtatttttagtagagacggggtttcactatgttggccaggctggtccaaaactcctgacctcaggtgatctgctcgccttggcctcccacagtgccaggattacaggcatgagccaccttgcccagccagttctgaaatcttttatgaagcctataaaaaaagataataataccaatctagaaaatatttcttaaggcagtcatgcattagtttgaactttccaaacaaaaaaatgcaatgtgtaatacttttttttttttttttgagatggagtcttgttctgttgcccaggctggagtgcagtggtacaatctcggctcactgcagcctctgcctctctggttcaagtgattctcctgcctcagcctcccaagtagctgggattacaggcgtgcaccaccatgcatggctaatttttgtatttttagtagagacagggtttcaccatgttgacaaggctgatctcgaactcctgacctcaggtgatccgcccacctcagcctcccaaagtgctgagattacaggcattagccaccacgcccagccttttattttagtagagaccatgtttcaccatgttgaccaagctggtcttgagctgacctcaagtgatccgcccacctccacctcccaaaatggtgggattataggcatgagccaccgcacccagcctgtaatacttttttgaagatctagaaccacattgttcaaagagatagaatgtgagcaataaatgtaacttaaatttttcaacagctactttttttttttttttttgagacagggtcttactctgttgtcccagctggagtacagtggtgcgatcatgaggcttactgttgccttgacctcctaggctcaagcgatcctatcacctcagtctcccaagtagctgggactgtaagtgcacaccaccatatccagctaaattttgtgttttctgtagagacggggtttcgccatgtttcccaggctggtcttgaactttgggcttaacccgtctgcccacctaggcatcccaaagtgctaggattacaggtgtgagtcatcatgcctggccagtattttagttagctctgtcttttcaagtcatatacaagttcattttcttttaagtttagttaacaacctttatacatgtattctttttctagcataaagaaagattcgaggccgggtgcggtggctcacgcctgtaatcccagcactttgggaggctgagatgggcacatcacgaggtcaggagatcgagaccatcctggctaacatggtgaaaccccgcctctactaaaattacaaaaagttagccaggcgtggtagcgggcacctgtagtcccagctactcaggaggctgaggcaggagaatggcgtgaacccaggaggcagagcttgcagtgagcagagattgtgccactgcactccagcctgagagacagagcgagactccgtctaaaaaaaaaaaaaaagattcgaatccttatcttggttgatttttgcgtatctagttccactgaattatttatataattgtatagactacagcacgagacagcttagcttgtcactctactgtactatattctgcagtactatcataagggaatttcctccctacccctgctctgaattgttcaattgtactatttgctggagtaatgcttgatgccttcttgatccattatactagagtatatgtagtatttgtagattctgaaggagtgggagcctctattctgagttttaaaggtacttatgtacagtggaggtagctttttgacagcctcatcttccaaactatagagtcattgttttgttgagtgcaatatggtacttgaagcatctatatcggcgaagaaggacccaagtctccttgaccttacctacctacattcactttctctggtaggaagattgtgggtgcctctctccagacttagtttccatgtcaaaaaagaaaaaaggaagattgtgggctttgctacaatccaattctggatccaatataaccttcattgcttaattactgtgtgatctgggacaagcctctactctataaaaatgaagataaggccaggcttgatggctcatgcctgtaatcccagcacgttgggatgccaaggcaggaggatcacttgaggtcaggagttcgagaccagactgggcaatatagtgaaaccacatctgtacaaaaataaagatagaaagtagcccagcgcaatggctcacacctgtaatcccagcactttgggaggctgaagcaggcgatcacttgaggtcgggagttcaagactgtagacagatagataggtaggtagatagatagagatatagatatagttggggtttttttgttttgttttgttttgtttttgagatggagtttcgctcttgttgcccaggctggagtgcaatggcgcgatctcagtttactgcaacctccgcctcccgggttcaagagattctcctgcctcagcctcctgagtagccaggattacaggcatatgccaccatgcccggctaatttttgtatttttagtagagacagggtttctccgtgttggtcaggctggtcttgaactcctgacctctcccaaagtgttgggattacaggcgtgagccaccgctcctggccttttttttttttttttttttttttttgagacagagtcttcctctgttgcccagggtggagtgcagtggcactcttctcagctcattgcaacctctgccatcctgggttccagtgattctcatgcctcagcctcccaagtagctgggactcaggcgtgtgcccaccacgcctggctaattttgttgtatttttagtagagacagggtttcaccatgttagccaggctggtctcaaactccaggcctcaagtgatctgcctgcctcagcctcctgggattgcagacatgagccactgcacccggccaagagagggtaataaatgttaaattacctggctagtaaaaaatattctctaagtgtcttttctcacaattcccaatgccttttttttttttttggcacaatctcactctgttgcccaggctggaatgcaatggtgcaatattggctcactgtaacccccgcctcacaggttcaacttattctcatgcctcagcctcccgagtaactgggactacagtgcaccaccaccacacccagctaatttttgaatatttagtagagacagggtttcaccatgttggccaggctggtcttgaactcctggcctcaagtgattcacccaccccgcaagtgctgggattacaggtgtggaccaccgtgcacagccctagtgactttttttttagccccttaatcttttctttcctgggtctcttcattgtcagtgtctgctatttactccctacctagtcacccccttcaccagtatattatgtcctttatgttttattttgcaggatcttattttgcttttctattgaatcccctccatctagaatagtactagacatagtaaatattggttgtatgagtgaatcgctgcttttaattatcatcaccattgctctctctacttctggtctatgatccactttgagttaacttttgttatttggtgtgagataggagtataatttcattcttttacatgtggttatacttttgtctcaacactgtttgttaaaaacacaaaaagtattattttcccatttaatcatctttggcctgggcacggtggctcatgcctgtaatcccagcactctggaaggccaaggcagatggatcaatttgaggccaggagttcaagactagccaacatggtgaaactaaaaatacaaaaaattagctgggtatggtggtgcatgtctgtaatcccagctactcgggaggctgaggcacgagaattgcttgagcctaggaggtggaggttgtagtgagctgagattgtgtcactaccctccagcctgggtgatagagtgagtctgtctcaaaaaaaaaaaaaaaaaattaagaaaataaaaatcgtcggccaggcatggtggctcacacctgtaatcccagcactttgggaggcagaggcgggcagatcacgaggtcaggagatggagaccatcctggctaacatggtgaaaccccgtctctactaaaaataaaaaaattagccgggcatggtgctgggcgcctgtagtcccagctgctcgggaggctgaggcaggagaatggcgtgaacccaggaggtggagcttgcagtgagccgagatcgtgccactgcactccagcctgggagacagagcgagactccgtctcaaaaaaaaaaaaaaaaaaaattgtcttggtatttattattgttgaaaatcgcttgatcacagatgtatgtatgagtttatttctgtactgtcaattccattttattgatgtatgtgtctattcttatgctattaccacactttcttgattactatagctttgtggtgaggtgttgagattttaaactaattataagcatcttacatgaactacttaccgtttatatttgattatgcagcatgaaataattatgaatatatcattaaatatgccatattaacttttattaagttttatgtgatcataacagtaagccatatgcatgtaagttcagttttcatagatcattgcttatgtagtttaggtttttgcttatgcagcatccaaaaacaattaggaaactattgcttgtaattcacctgccattactttttaaatggctcttaagggcagttgtgagattatcttttcatggctatttgccttttgagtattctttctacaaaaggaagtaaattaaattgttctttctttctttataatttatagattttgcatgctgaaacttctcaaccagaagaaagggccttcacagtgtcctttatgtaagaatgatataaccaaaaggtatataatttggtaatgatgctaggttggaagcaaccacagtaggaaaaagtagaaattatttaataacatagcgttcctataaaaccattcatcagaaaaatttataaaagagtttttagcacacagtaaattatttccaaagttattttcctgaaagttttatgggacatctgccttatacaggtattagaaacttactgcctttctctaatgcttctagtgtaaaaacttgcagacttatgtaaagtagggctgtatcgccgtgcccccattgtctgttaatcttgtttttatatttttgattgtgtttccttttctttttttttttttttttaagacagggtcctgctctgtcactgaggctggagtgcagtggcgtgatctcggctcactgtagcctctgtctcccagcctcttcctgccttagcctcccaaatagctgggactacaggcacacgctaccatgcccggccaatttttgtattttttgtagagatgaggttttaccatgttgcccaggctggtaactcctgagctcaggtgatctgcccacctcggcctcccaaagtgctggggttcacaggtgtgtgtttatttctatctaattatttacacaaacacaatgtatttatatattgtgtatctcttctgctacaatgtaaattctatgagagtagtaattttgtctgtctcaacactgtttttcctaagtttggtacatagtaggcactcagatgcttaaaggaatgaatgaattgtgctttaattccactttactaaacccaaatctccctttggacattgttatctatgtgttttcaaagaagtataatcataatttgacagaaatccttgagaggcagaactaagtgagggattgggcagggttcagatgttaagaacagtaagctcagcagggtgtgattgctcatgcctataaccctagcactctaggaggctgaggtgggatgattgcttgaggccaggagtttgaaatcagcctgggcaacatagtgagaccccatcactaccaacaaaataaataaataaatgtacatggtggcatatgcccatagtcctagctacttgggaggctatagtgggaggatagcttgagtacagaagtctgaggctgcagtgagctatgattgtggcactgcatgctagcctgggcaatagagcaagaccctgtctctaaattaaacaaaaaaaaaagtactctagttttctatgcaatgcattatatctgctgtggatttagggcagtattatatcagataattttaggcatttggtaggcttaaatgaatgacaaaaagttactaaatcactgccatcacacggtttatacagatgtcaatgatgtattgattatagaggttttctactgttgctgcatcttatttttatttgtttacatgtcttttcttattttagtgtccttaaaaggttgataatcacttgctgagtgtgtttctcaaacaatttaatttcaggagcctacaagaaagtacgagatttagtcaacttgttgaagagctattgaaaatcatttgtgcttttcagcttgacacaggtttggagtgtaagtgttgaatatcccaagaatgcaactcaagtgctgtccatgaaaactcaggaagtttgcacaattactttctatgacgtggtgataagaccttttagtctaggttaattttagttctgtatctgtaatctatttttaaaaaattactcccactggtctcacaccttattttatcaatcgtaaggtgcacatttttcacatcttaacatctctgaaattgggaacattttactattgagggtgtgtcatttgtttaatttgtgtgctttctttcttagtgatacacgaaataatagtgccacttacattgttggtgtcttagctttagtgaaatacagtattgataggcaaatttcttagtgttaaggtagaaaacaaggactctaaataactttgatggtctgtgtatttgtttttgtttcctaggagtaaaatttccagttgattttttaaaatttgatttttaaaaaaaatcacaggtaaccttaatgcattgtcttaacacaacaaagagcatacatagggtttctcttggtttctttgattataattcatacatttttctctaactgcaaacataatgttttcccttgtattttacagatgcaaacagctataattttgcaaaaaaggaaaataactctcctgaacatctaaaagatgaagtttctatcatccaaagtatgggctacagaaaccgtgccaaaagacttctacagagtgaacccgaaaatccttccttggtaaaaccatttgttttcttcttcttcttcttcttcttttcttttttttttcttttttttttttgagatggagtcttgctctgtggcccaggctagaagcagtcctcctgccttagcccccttagtagctgggattacaggcacgcgccaccatgccaggctaatttttgtatttttagtagagacggggtttcatcatgttggccaggctggtctcgaactcctaacctcaggtgatccacccacctcggctccccaaattgctgggattacaggtgtgagccactgtgcccggccggtaaaaccattttcatttattctggcaacatctctttattgagcattgtgaatatgttagtgaatgtgctagatgctcatagatttatataaaaagttagtgaagaaggaaagatggtatattaagtggttagacaagtgttctaatcagttagagttcagagaaggtcagggtacctgatataatcaagagagagaccttacagccaggtgaggtgaatgtacctataatcccagctacttaggaggctgaaatgggaggatcacttgagtccaggtttgagaccagcccaggcaacatagcaagatccccatcagatacaccaaaaagacagatttcttttttttttttttttttgagacagagtctcgctctgtcgcccaggctggagcgcagtgacacgatgtcagctcactgcaacctccgcctcccaggttcaagtgattctcctgcctcagcctcctgagtagttgggactacaggggtacgacaccagacctggctaatttttgtaattttagtagagtcggggtttcaccatattggtcaggctggtctcgaactcctgacctcaggtgatccaccctccttggcctcccagagtgctgggattacaggcgtgagccaccaagcccggccaaaaaagagagctcttataggcccttccttgctttggagctttatctgctctgtgatgcttatctaaaatagccataaggtcactgatatttttaagcatttggaaattacttcagctgggtgccatggctcatgcctataatcccaaccctttgggaggctgaggtaggaggtcctttgagcccagcttgggcaacacagtgagacactgtctctgcaattaaaaaaaaaaaaaaagtagctgggtgccgtggctcacgcctgtaattccagcactaggaggcttgaggattgcctgagctcaggagttcaagaccagtttgggcaacatagcaagtccttgtctatattaaaagtttttttaaattatctgggcatggtggtgtgtgcctgtagtcccagctacttgggaagctgagacagaaggatcacttgagtccaggagatgtagactacagtgagctatgatcactccactgcacttcagcgtgggcggcaaagcaagatctagttgcaaaaaaaaaaagaactggctgggtgcggcggctaacacctgcaatcccagcaccttgggaggctgaggccagtggatcatgaggtcaggagattgagaccaccctggccaacatggtgaaacccggtctctactaaaaatacaaaaattagctgggtgtggtggcacgtgcctgtaatcccagctactccagaggctgaggatggagaatcacttgaacctgagagtcggaggttgcagtgagccgagattgcgccactgcactccagcctggcgacagagcgagactccgtctcaaaaaaaaaaaaaaaaaagcttcacgcctgtaatcccagcactttgggaggccgagtcaagtggatcacgaggtgtggagatcaagactatcctggctcacatggtgaaagcccgtctctactaaaaacacagaaaaattagctgagcgtgatggcggactcctgtagtcccagctactcgggaggctgaggcaggagaatagcatgaacccgggaggtggagcttgcagtgagccgagatcccgccactgcgatccagcctgggcgacagagtgagactctgtctcaaaaaaaaaacaaaaaaacttagctgggcgtggtggtatgcacctgtggtcctagctacttgggaggctgaggctggagcattgctttaacatagagagtcaaggctgcagttgagctatgactgtgccactggactccagcgcaggtgactgagaccctatcttttaaaaaaagggaaaattacttgaacttaaaaggtgtaattgttaaagaaaatgtagtgatttgctctgttgttacttatatgtgcatgaatgatggagatcttaaaaagtaatcattctggggctgggcgtagtagcttgcacctgtaatcccagcacttcgggaggctgaggcaggcagataatttgaggtcaggagtttgagaccagcctggccaacatggtgaaacccatctctactaaaaatacaaaaattagctgggtgtggtggcacgtacctgtaatcccagctactcgggaggcggaggcacaagaattgcttgaacctaggacgcggaggttgcagcgagccaagatcgcgccactgcactccagcctgggccgtagagtgagactctgtctcaaaaaagaaaaaaaagtaattgttctagctgggcgcagtggctcttgcctgtaatcccagcactttgggaggccaaggcgggtggatctcgagtcctagagttcaagaccagcctaggcaatgtggtgaaaccccatcgctacaaaaaatacaaaaattagccaggcatggtggcgtgcgcatgtagtcccagctccttgggaggctgaggtgggaggatcacttgaacccaggagacagaggttgcagtgaaccgagatcacgccaccacgctccagcctgggcaacagaacaagactctgtctaaaaaaatacaaataaaataaaagtagttctcacagtaccagcattcatttttcaaaagatatagagctaaaaaggaaggaaaaaaaaagtaatgttgggcttttaaatactcgttcctatactaaatgttcttaggagtgctggggttttattgtcatcatttatcctttttaaaaatgttattggccaggcacggtggctcatggctgtaatcccagcactttgggaggccgaggcaggcagatcacctgaggtcaggagtgtgagaccagcctggccaacatggcgaaacctgtctctactaaaaatacaaaaattaactaggcgtggtggtgtacgcctgtagtcccagctactcgggaggctgaggcaggagaatcaactgaaccagggaggtggaggttgcagtgtgccgagatcacgccactgcactctagcctggcaacagagcaagattctgtctcaaaaaaaaaaaacatatatacacatatatcccaaagtgctgggattacatatatatatatatatatatatcatatctatatatatatatatgtaatatatatgttatatatatattacatatatatatgttatatatatgttatatatatataatatatatatgttatatatatgttatatatatatatacacacacacacacatatatatgtatatatatatacacacacacacacatattagccaggcatagttgcacacgcttgtagacccagctactcaggaggctgaggcaggagaatctcttgaacttaggaggcggaggttgcagtgagctgagattgcgccactgcactccagcctgggtgacagagcaggactctgtacaccccccaaaacaaaaaaaaaagttatcagatgtgattggaatgtatatcaagtatcagcttcaaaatatgctatattaatacttcaaaaattacacaaataatacataatcaggtttgaaaaatttaagacaacagaaaaaaaaattcaaatcacacatatcccacacattttattattactactactattattttgtagagactgggtctcactctgttgcttatgctggtcttgaactcctggcctcaagcagtcctgctccagcctcccaaagtgctgggattataggcatgagctaccgctcccagccccagacattttagtgtgtaaattcctgggcattttttccaggcatcatacatgttagctgactgatgatggtcaatttattttgtccatggtgtcaagtttctcttcaggaggaaaagcacagaactggccaataattgcttgactgttctttaccatactgtttagcaggaaaccagtctcagtgtccaactctctaaccttggaactgtgagaactctgaggacaaagcagcggatacaacctcaaaagacgtctgtctacattgaattgggtaagggtctcaggttttttaagtatttaataataattgctggattccttatcttatagttttgccaaaaatcttggtcataatttgtatttgtggtaggcagctttgggaagtgaattttatgagccctatggtgagttataaaaaatgtaaaagacgcagttcccaccttgaagaatcttactttaaaaagggagcaaaagaggccaggcatggtggctcacacctgtaatcccagcactttgggaggccaaagtgggtggatcacctgaggtcgggagttcgagaccagcctagccaacatggagaaactctgtctgtaccaaaaaataaaaaattagccaggtgtggtggcacataactgtaatcccagctactcgggaggctgaggcaggagaatcacttgaacccgggaggtggaggttgcggtgaaccgagatcgcaccattgcactccagcctgggcaaaaatagcgaaactccatctaaaaaaaaaaaagagagcaaaagaaagaatatctggttttaaatatgtgtaaatatgttttggaaagatggagagtagcaataaggaaaaacatgatggattgctacagtatttagttccaagataaattgtactagatgaggaagccttttaagaagagctgaattgccaggcgcagtgctcacgcctgtaatcccagcactttggaaggccgaggtgggcggatcacctgaggtcgggagttcaagaccagcctgaccaacatggagaaaccccatctctactaaaaaaaaaaaaaaaaaaattagccggggtggtggcttatgcctgaaatcccagctactcaggaggctgaggcaggagaatcgcttgaacccaggaagcagaggttgcagtgagccaagatcgcaccattgcactccagcctaggcaacaagagtgaaactccatctcaaaaaaaaaaaaaaagagctgaatcttggctgggcaggatggctcgtgcctgtaatcctaacgctttggaagaccgaggcagaaggattggttgagtccacgagtttaagaccagcctggccaacataggggaaccctgtctctatttttaaaataataatacatttttggccggtgcggtggctcatgcctgtaatcccaatactttgggaggctgaggcaggtagatcacctgaggtcagagttcgagaccagcctggataacctggtgaaacccctctttactaaaaatacaaaaaaaaaaaaaaattagctgggtgtggtagcacatgcttgtaatcccagctacttgggaggctgaggcaggagaatcgcttgaaccagggaggcggaggttacaatgagccaacactacaccactgcactccagcctgggcaatagagtgagactgcatctcaaaaaaataataatttttaaaaataataaatttttttaagcttataaaaagaaaagttgaggccagcatagtagctcacatctgtaatctcagcagtggcagaggattgcttgaagccaggagtttgagaccagcctgggcaacatagcaagacctcatctctacaaaaaaatttcttttttaaattagctgggtgtggtggtgtgcatctgtagtcccagctactcaggaggcagaggtgagtggatacattgaacccaggagtttgaggctgtagtgagctatgatcatgccactgcactccaacctgggtgacagagcaagacctccaaaaaaaaaaaaaaaagagctgctgagctcagaattcaaactgggctctcaaattggattttcttttagaatatatttataattaaaaaggatagccatcttttgagctcccaggcaccaccatctatttatcataacacttactgttttccccccttatgatcataaattcctagacaacaggcattgtaaaaatagttatagtagttgatatttaggagcacttaactatattccaggcactattgtgcttttcttgtataactcattagatgcttgtcagacctctgagattgttcctattatacttattttacagatgagaaaattaaggcacagagaagttatgaaatttttccaaggtattaaacctagtaagtggctgagccatgattcaaacctaggaagttagatgtcagagcctgtgctttttttttgtttttgtttttgttttcagtagaaacgggggtctcactttgttggccaggctggtcttgaactcctaacctcaaataatccacccatctcggcctcctcaagtgctgggattacaggtgagagccactgtgcctggcgaagcccatgcctttaaccacttctctgtattacatactagcttaactagcattgtacctgccacagtagatgctcagtaaatatttctagttgaatatctgtttttcaacaagtacatttttttaacccttttaattaagaaaacttttattgatttattttttggggggaaattttttaggatctgattcttctgaagataccgttaataaggcaacttattgcaggtgagtcaaagagaacctttgtctatgaagctggtattttcctatttagttaatattaaggattgatgtttctctctttttaaaaatattttaacttttattttaggttcagggatgtatgtgcagtttgttatataggtaaacacacgacttgggatttggtgtatagatttttttcatcatccgggtactaagcataccccacagttttttgtttgctttctttctgaatttctccctcttcccaccttcctccctcaagtaggctggtgtttctccagactagaatcatggtattggaagaaaccttagagatcatctagtttagttctctcattttatagtggaggaaataccctttttgtttgttggatttagttattagcactgtccaaaggaatttaggataacagtagaactctgcacatgcttgcttctagcagattgttctctaagttcctcatatacagtaatattgacacagcagtaattgtgactgatgaaaatgttcaaggacttcattttcaactctttctttcctctgttccttatttccacatatctctcaagctttgtctgtatgttatataataaactacaagcaaccccaactatgttacctaccttccttaggaattattgcttgacccaggtttttttttttttttttttggagacggggtcttgccctgttgccaggatggagtgtagtggcgccatctcggctcactgcaatctccaactccctggttcaagcgattctcctgtctcaatctcacgagtagctgggactacaggtatacaccaccacgcccggttaattgaccattccatttctttctttctctcttttttttttttttttttgagacagagtcttgctctgttgcccaggctggagtacagaggtgtgatctcacctctccgcaacgtctgcctcccaggttgaagccatactcctgcctcagcctctctagtagctgggactacaggcgcgcgccaccacacccggctaatttttgtatttttagtagagatggggtttcaccatgttggccaggctggtcttgaactcatgacctcaagtggtccacccgcctcagcctcccaaagtgctggaattacaggcttgagccaccgtgcccagcaaccatttcatttcaactagaagtttctaaaggagagagcagctttcactaactaaataagattggtcagctttctgtaatcgaaagagctaaaatgtttgatcttggtcatttgacagttctgcatacatgtaactagtgtttcttattaggactctgtcttttccctatagtgtgggagatcaagaattgttacaaatcacccctcaaggaaccagggatgaaatcagtttggattctgcaaaaaagggtaatggcaaagtttgccaacttaacaggcactgaaaagagagtgggtagatacagtactgtaattagattattctgaagaccatttgggacctttacaacccacaaaatctcttggcagagttagagtatcattctctgtcaaatgtcgtggtatggtctgatagatttaaatggtactagactaatgtacctataataagaccttctgtaactgattgttgccctttcgtttttttttttgtttgtttgtttgtttttttttgagatggggtctcactctgttgcccaggctggagtgcagtgatgcaatcttggctcactgcaacctccacctccaaggctcaagctatcctcccacttcagcctcctgagtagctgggactacaggcgcatgccaccacacccggttaattttttgtggttttatagagatggggtttcaccatgttaccgaggctggtctcaaactcctggactcaagcagtctgcccacttcagcctcccaaagtgctgcagttacaggcttgagccactgtgcctggcctgccctttacttttaattggtgtatttgtgtttcatcttttacctactggtttttaaatatagggagtggtaagtctgtagatagaacagagtattaagtagacttaatggccagtaatctttagagtacatcagaaccagttttctgatggccaatctgcttttaattcactcttagacgttagagaaataggtgtggtttctgcatagggaaaattctgaaattaaaaatttaatggatcctaagtggaaataatctaggtaaataggaattaaatgaaagagtatgagctacatcttcagtatacttggtagtttatgaggttagtttctctaatatagccagttggttgatttccacctccaaggtgtatgaagtatgtatttttttaatgacaattcagtttttgagtaccttgttatttttgtatattttcagctgcttgtgaattttctgagacggatgtaacaaatactgaacatcatcaacccagtaataatgatttgaacaccactgagaagcgtgcagctgagaggcatccagaaaagtatcagggtagttctgtttcaaacttgcatgtggagccatgtggcacaaatactcatgccagctcattacagcatgagaacagcagtttattactcactaaagacagaatgaatgtagaaaaggctgaattctgtaataaaagcaaacagcctggcttagcaaggagccaacataacagatgggctggaagtaaggaaacatgtaatgataggcggactcccagcacagaaaaaaaggtagatctgaatgctgatcccctgtgtgagagaaaagaatggaataagcagaaactgccatgctcagagaatcctagagatactgaagatgttccttggataacactaaatagcagcattcagaaagttaatgagtggttttccagaagtgatgaactgttaggttctgatgactcacatgatggggagtctgaatcaaatgccaaagtagctgatgtattggacgttctaaatgaggtagatgaatattctggttcttcagagaaaatagacttactggccagtgatcctcatgaggctttaatatgtaaaagtgaaagagttcactccaaatcagtagagagtaatattgaagacaaaatatttgggaaaacctatcggaagaaggcaagcctccccaacttaagccatgtaactgaaaatctaattataggagcatttgttactgagccacagataatacaagagcgtcccctcacaaataaattaaagcgtaaaaggagacctacatcaggccttcatcctgaggattttatcaagaaagcagatttggcagttcaaaagactcctgaaatgataaatcagggaactaaccaaacggagcagaatggtcaagtgatgaatattactaatagtggtcatgagaataaaacaaaaggtgattctattcagaatgagaaaaatcctaacccaatagaatcactcgaaaaagaatctgctttcaaaacgaaagctgaacctataagcagcagtataagcaatatggaactcgaattaaatatccacaattcaaaagcacctaaaaagaataggctgaggaggaagtcttctaccaggcatattcatgcgcttgaactagtagtcagtagaaatctaagcccacctaattgtactgaattgcaaattgatagttgttctagcagtgaagagataaagaaaaaaaagtacaaccaaatgccagtcaggcacagcagaaacctacaactcatggaaggtaaagaacctgcaactggagccaagaagagtaacaagccaaatgaacagacaagtaaaagacatgacagcgatactttcccagagctgaagttaacaaatgcacctggttcttttactaagtgttcaaataccagtgaacttaaagaatttgtcaatcctagccttccaagagaagaaaaagaagagaaactagaaacagttaaagtgtctaataatgctgaagaccccaaagatctcatgttaagtggagaaagggttttgcaaactgaaagatctgtagagagtagcagtatttcattggtacctggtactgattatggcactcaggaaagtatctcgttactggaagttagcactctagggaaggcaaaaacagaaccaaataaatgtgtgagtcagtgtgcagcatttgaaaaccccaagggactaattcatggttgttccaaagataatagaaatgacacagaaggctttaagtatccattgggacatgaagttaaccacagtcgggaaacaagcatagaaatggaagaaagtgaacttgatgctcagtatttgcagaatacattcaaggtttcaaagcgccagtcatttgctccgttttcaaatccaggaaatgcagaagaggaatgtgcaacattctctgcccactctgggtccttaaagaaacaaagtccaaaagtcacttttgaatgtgaacaaaaggaagaaaatcaaggaaagaatgagtctaatatcaagcctgtacagacagttaatatcactgcaggctttcctgtggttggtcagaaagataagccagttgataatgccaaatgtagtatcaaaggaggctctaggttttgtctatcatctcagttcagaggcaacgaaactggactcattactccaaataaacatggacttttacaaaacccatatcgtataccaccactttttcccatcaagtcatttgttaaaactaaatgtaagaaaaatctgctagaggaaaactttgaggaacattcaatgtcacctgaaagagaaatgggaaatgagaacattccaagtacagtgagcacaattagccgtaataacattagagaaaatgtttttaaagaagccagctcaagcaatattaatgaagtaggttccagtactaatgaagtgggctccagtattaatgaaataggttccagtgatgaaaacattcaagcagaactaggtagaaacagagggccaaaattgaatgctatgcttagattaggggttttgcaacctgaggtctataaacaaagtcttcctggaagtaattgtaagcatcctgaaataaaaaagcaagaatatgaagaagtagttcagactgttaatacagatttctctccatatctgatttcagataacttagaacagcctatgggaagtagtcatgcatctcaggtttgttctgagacacctgatgacctgttagatgatggtgaaataaaggaagatactagttttgctgaaaatgacattaaggaaagttctgctgtttttagcaaaagcgtccagaaaggagagcttagcaggagtcctagccctttcacccatacacatttggctcagggttaccgaagaggggccaagaaattagagtcctcagaagagaacttatctagtgaggatgaagagcttccctgcttccaacacttgttatttggtaaagtaaacaatataccttctcagtctactaggcatagcaccgttgctaccgagtgtctgtctaagaacacagaggagaatttattatcattgaagaatagcttaaatgactgcagtaaccaggtaatattggcaaaggcatctcaggaacatcaccttagtgaggaaacaaaatgttctgctagcttgttttcttcacagtgcagtgaattggaagacttgactgcaaatacaaacacccaggatcctttcttgattggttcttccaaacaaatgaggcatcagtctgaaagccagggagttggtctgagtgacaaggaattggtttcagatgatgaagaaagaggaacgggcttggaagaaaataatcaagaagagcaaagcatggattcaaacttaggtattggaaccaggtttttgtgtttgccccagtctatttatagaagtgagctaaatgtttatgcttttggggagcacattttacaaatttccaagtatagttaaaggaactgcttcttaaacttgaaacatgttcctcctaaggtgcttttcatagaaaaaagtccttcacacagctaggacgtcatctttgactgaatgagctttaacatcctaattactggtggacttacttctggtttcattttataaaagcaaatccaggtgtcccaaagcaaggaatttaatcattttgtgtgacatgaaagtaaatccagtcctgccaatgagaagaaaaagacacagcaagttgcagcgtttatagtctgcttttacatctgaacctctgtttttgttatttaaggtgaagcagcatctgggtgtgagagtgaaacaagcgtctctgaagactgctcagggctatcctctcagagtgacattttaaccactcaggtaaaaagcgtgtgtgtgtgtgcacatgcgtgtgtgtggtgtcctttgcattcagtagtatgtatcccacattcttaggtttgctgacatcatctctttgaattaatggcacaattgtttgtggttcattgtctccttaaattagactgtaagcaccttgatggaactcatactaccttttatttcacacacacgcacacgcgcacacacagcctacacatacactgcctagctcattgtagcatactaaatactgattttaatgaataagctaaaccttcgaaacccatttgctaatcccagcactttgggaggccaaggtgggtggatcacctcaggtcagaagtttgagaccagcctggccaacatggtgaaaccccacatctactaaaaatacaaaaattagctgggcgtggtggccaatgccttgtaatcccagctattctggaggctgagacaggagaatcgcctgaacctgggaggcggaggttgcactgagctgggattgtaccactgcactccagcctgggtgacaaagtgagactccatctcaaaaacaaacaaacaaaaacacatcatttcccctatagcaaaaacatgacggcacttactgtatcaagagaggtgagaaaaaggagccacagcaggatgattcaagggactctgcatagctccattttaagaatatgcctactgcaggtcagagaaggtaagcaaactgcctaaggccacacagccaggtacagaactctcaccaatattattgccagcaatcgcaattttggtgtttattcttggtaccaagttggagactatagggttctcttcctaatagagaccatctagcctttcactgttttgtggatacttctttctcttcttctttttttttttcccttttaaaatctagttatttttttctttttggtttctttgacacagggtctcttactctgttacccaggctggaatggagtagtgcagtcatggttcactgtagctttgacttcctgggctcaagcgatcctcctacctcagcttcccgagtagctgggaccacaggcgcccaccaacacctccagctaatttttaagtttttactagagacaacatctcactatgttgcccaggctggtctcaaaatcctgggctcaagtgatcccacctcagccttccaaaatgctgggattacaggtgtgtgcaccacgcctggcctattttttttttaattgctcataaatcatcttttttctttaaaaaaaagaaagatgggaggctaaagcaggagaatcacttgaacccaggaggcggaggttgcagtgagctgagatcatgctgctgctctccagcctgggcaacaagagtgaaactccatctcaaaaaaaaaaaaaaagaaagtacacaattttactttctggacctaatggtcaaggccaataatttggtcacctatgaaataaataaaagctttaccatatatatgaccatttgataatgtaatatgaaatgtttatgtactaaaggcagaatagtctagaaaaaacattctgtatcacaacgtctaaaaatgaatatcatcttcatcatagaaccaggctctttctcctaatttttttttttgagatggagttttgctctgtcacccaggctggaatgcagtggcacaattttggctcactgcaaccttcagctcccaggttcaggatcaagtgattttcgtgcttcagccttctaagtagctgggattacaggtgactgccaccacacccagctcatttttttgtatttttttagtagagagagggtttcaccatgttggccaggctcgtctcgaactcctgacctcaaataatccacccgtctcagcctcccaaagtgctgagattacaggcgtgagccaccaggcctggcctcctaatttttatttgtagaagtggcaccaaaattttccaagttctcatgcaaaaattcaggctcatctcagtttatttttttcatttatttatctcccactaaattgacaacttctaataattaggttggttctttgtattcccagcacagggttctatgcagaatacacacacagcagttgctggcaataatattggtgagagttctgtactgggctatgtgatcttagacagtttgcttatgttctctgacctgccgtaggcacattcttaaaatgaagctgttcagaccccctcgattcatcctgctgtggcttctttttcccacctaaatcttaaatacccttttagctgctagtaagtgaatgatgtttttttatgaactttctgaagtcagattagatgaagttgagaaaagcctgatattcttataaagttatatatgtgcatcatagaaaacttagaaaatacagataaacaaaaatcatccatggacgaaccttgaagacattgtgttaactgaaataaaccggacaccaaaggacacatgttatatgcttccacttatatgagatacctagaatagttacatttggttactctgggtacattgcctatagataagccttgctccacaaggagcagttaaaaaaaaaaaaaagataaattcataggatggaaggtagaatagtggttactagggacttggggagggggaaatggggagttactgtttgatgagtgcagatttcagtttgggatgatgaaaaagttctggagatagatagtggcaatggtaacacaacagtgtgaaaataatgccactgaactgtacacttaaaatgattaaaatgataagttaattgtaatttgtgttatccagaaatggttagcaatttattggtgtatattcttttagtattcctgtgtgtgcacaggggtgcttgtatatactttatctttaaaatatatccaggaagctaggcacagtggcttacacctgtaatcccagcactttgggagggtgaggcaggaagattgcctgagccccggaggtcaaggctgcagtgagttgtgatcacgctactgcactctgttctgggcaacccctgtctgggaaaaaaaaaaaaattagtgaggcttagtggtgcacacctgtagtctcagctacttgagtggctggggtaggattgcttgatcccagcaagttgaggccgtggtgagccatgatggtgccactgcactccatcctgggtgatatggtgagaccctgtctcaaaaacaagaaatccagataattctgtgcattataatctagcttttactggatcattaaaattcttttttctttttttttttttttttctgagatggagtttcactcttgttgcccaggctggagtgcagtggtgtgaccttggctcaccgcatcctctgcctcccgggttcatgcgattctcctgcctcagcctcccgagtagctgggattacaggcatgtgccaccatgcccagctaactttgtatttttagtagagacagggtttctccatgttgaccaggctggtctcaaactcctggcctcaagtgatccacccacctcggcctcccaaagtgctggggttacaggcgtgagccaccgcactcagcctgggtcgttaaaattcttaagtgacttcatttttaattactatatgggattctatctttccagtgtatcatgatttatttgacctattgctgaatgttggaggtttcagggtaagaggcacagtttgctattatgtacatcactatagtggcatcctgatagctaaatatttgcctacatccctgattatttccttagtctaaattactgggactaggattttggtgtttgatacatgttactaaattgttttttagaaagattaaaccagtttatgctcttccagcccctgtggtatatgatagttcccattttcctgtaccttgccaacactgggtgatatccagttttaaaatctaaatcttgcattgctatgagaactacaattagagaaggcttatcttctactgcccattctctgtacagagcaaatccctctagacctgaagccccttggagttgtcaagaaacctttgagatgactccccactctgtatctgagctgtcaccagtattctccacttcttcaggattgccatggcaactaaattgatgaaaagatttaggaggccttttctctctttgcaattcctatgatcctttttgaatgtgggtttgggactctgtcaatatacccatcatctaattctgtccattgtgttttaaagtttaaggttgcaatttctgattacatctgccttagccatactgtattatatttgacattcaatatacaatgtccttgtttttctgtatttctaatcttattcccagagatgtgtctatttgttcaggattcattttgcaacgtgtttttactaagcatctacccaaaaccgttgaagtcagatttcaggctgtcttacgtctaaagtagcacaggcaggaaaaactattgaagtgggatttttttttccctttttgtactgaaccgagaaaaagtatatagatgatagagaattcctaatttggtatcattgatatctgggtttttgtttgtttttacagaagactgattaactatacttatttattaatttatcttctcattaataaacacttgctgagtgcttactgtctgctaggcattagggagacaaatatgattaagggaagcttcctcctatcaaggtcatgtgttccatttgggtatactaatgcattagcaatgtaaatcaagtagtgagagatcatctgttcccgataggagatggattattggtggggacttctgtgtgtgtgtgtgtgtgtgtgtgtgtgtgtgtgtgtgtatgtatgtgataaaataaatataggaaatgttaattatagattctaagtagtagatatataaacactcattgcaaagttgcttcaagttttctgtatatttgaaaatattcacaacatgtcgacaaaactagcatgataaagccactatttgtgctaagacttcagcttgtatctggattaggcttattatgtagtagtaggaacattagaaatagttttaactcattaaatacacatgttttatgggaaggttttatatatatatttatatgtaatgaatgtgaacaaacaagggtcagatatacactctgcttccctccagaccagttccggctgctctgctgcacatttcaggagtcttattagaattagccacattctgcccacttgcccttacttctcatatttcacaactcctcctggtggggacttaaggagacattcaaactaggccttgaaagatgagaatttttccaagtggaaaaagaggagtggcagcaagtaaggtaaaggtacagagtcatggaattcccaggaaacgtaaagttgtcatgtgttataggaaaacaacttgtgtgaggggtgttgggagaaatgagagataataccagggtataaagggccttttgaatgctatgttgaggaattttatcctaatggcagtaatgactaacaattatatagtgttcaaaaagtataaatcagcagtggtataccactaagggtttttttcttttctttttttttttgagacagagttttgctctgttgcccaggctggagtgccgtggcacgatctcagctcactgcacttccgccacctgggttcaagtgattcttctgcctcagccagtgtttcactgtgatggccaggatggagcactaagggtctttatggaagaaaaagacatgataaacaaggcttttagggaacttctacagtaatgtagctgtattaaaagtagagatcagagcagcatagtagaagtagaaggctagagctaattgaaggagcacttcagaattagaatcaagaagtcttagaaacctattggttttattctccctaatgtatttggccacttacctgctggggaatttgtctaagttataaaaaataattcctttgggaaacccaaaggaaagttatctattaataattaccccactactttttctgatttatgtaatggccacgtagaggttagatgtgatggttgtgacagtagtgactaatacagcctgtgaagcattttggtcagatatctatgtgctttcattccaggttgactgaggcaagactttggctagggtttgatcagtgatgtaactactcacgagtaccacgtggtggcaatggcattgctgcagaccttggcagcaaagcagtgttagagtagcagtagaaacctttgtgaagctaggaatacattttctggtcataaaaacctcctgaaaattgtgaactcagtgtagcaggagaaagaagatggcttgtttttagtaaagggcaaagtcatttttaaggatcagaagaagaaacggagagtgaaacaatgtgttcctgccctactcccccactggactttttggcaaccattgctgttccttctaaaagtgatttttaaacatgtatattttgaagccaggcacagtgactcacgtctgtaatcccagcactttgggaggccgaggcgggcagatcacctgaggtcaggagttcaagaccagcctggccaacatggtgaaaccccgtctctactaaaaatacaaaaattaggccaggtgtggtggctcacgcctgtaatcccagcactttgggaggccgaggcgggaggatcatgtggtcaggagatccagaccatcctggctaacacggtgaaacaccatttctactaaaaatacaaaaaattagctgggcatggtggcgggcgcctgtaatcccagctactcaggaggctgaagcagaagaatggcttgaacctgggaggcggagcttgcagtgaaccaagattgcgccactgcactccagcctgggcaacaaagtgagactccgtctcaaaaaaaaaaaaaaaaattagtcgggcatggtaacaggtgcctgtaatcccagctacttgagaggctgaggcagggagaattgcttgaaccaggtaggcggaggttgcagtgagccaagatcgcaccactgcactccagcctggggcaacagagcaagactgtctcaaaaaaaataaataaataaaataaattcttaagaaggatattttggaaaactccttacatacctaaattctttgtttatcaaatacttggacttagcacactcttctttgaaatggaccaataaacaacaggagcccataagcaaaaagaactcattattttaaaaacagtaactatccttacaggctttctcagggctctttctgttggatccttccctctcacaggtccttgctaatgatctctaggtggacacattctagatgagatgtccctgtctagaatggcagcaccatgagggctatatcctcagtactaggacagcgcctggtgcttaatagatagtaaatagttgtctaattaactgagcaaacagatagattcatgaattagctttttgctttttctgttagaaactaaaggttcaggtcaggcacaatggcgcatgtctctaatcccagcactttgggaggccgaggcgggctgatcacttgaggtcaggagttcaagaccagcctggccaacatagtaaaaccctgtttctacaaaaattaccaaaattagccgggcgtcttggcaagcacctgtaatgccagctacttgagaggctgaggtgggagaatcgcttgaacctgggaggaagaggttgcagtgagccgagatggtgccaacctgggtgacagagggagacttaaaaaaaaaaagaaagaaagaaagaaaagaaactaaaggttcaaagaatcccagaaaaggaagagtcctcacaagccagtaatctaggcaggattactgatagtatttttatatttgttgtatttttataaaatgccatagatagagggcttttttcaacattacatcagtctaaaaatcacacatttttatatgaactaacctaaatgtctgatgaatctcacaacaccaagtctttgaaatgtgcccatataaataaaatgttaacagattcatgctaattttaaatatcgatagtgtttaaatgccttaattattttttcactccctagctttaaaagaaaataaccaacttcaaaaggacatcacaataacatcaagtctatttgggggaatttgaggattttttccctcactaacatcatttggaaataatttcatgggcattaattgcatgaatgtggttagattaaaaggtgttcagctagaacttgtagttccatactaggtgatttcaattcctgtgctaaaattaatttgtatgatatattttcatttaatggaaagcttctcaaagtatttcattttcttggtgccatttatcgtttttgaagcagagggataccatgcaacataacctgataaagctccagcaggaaatggctgaactagaagctgtgttagaacagcatgggagccagccttctaacagctacccttccatcataagtgactcttctgcccttgaggacctgcgaaatccagaacaaagcacatcagaaaaaggtgtgtattgttggccaaacactgatatcttaagcaaaattctttccttcccctttatctccttctgaagagtaaggacctagctccaacattttatgatccttgctcagcacatgggtaattatggagccttggttcttgtccctgctcacaactaatataccagtcagagggacccaaggcagtcattcatgttgtcatctgagtacctacaacaagtagatgctatggggagcccatggaagatacatggtatacaacatagctcttgctctattggaagctaagtggaatgggagaaattggtgacaggcaaccccataatttcagaaagctatgaaaaagtactcagacatattccttataacactggtgtcacatcacaaagacctatttaatgtgcttctgatttatagggagagacatcctatacttcaggaactgcactttgatccacagaaagcctagtgatgtagagctcctgttagttcaaaaggaaaagaaaagaacaacacagaaagcctaattatgcaatagagtcaagtgctttatagcaatgttacagttatcaaaaaaaatccagatggacctctgagaggatgccattggagtaaccaggcagatgcagttgatcagagctgacttcctataagaagtgagcactgagctgaggaataatggcataaatgaaggaaagtgagatggaaatttgagtttttaattggaaagacaatacatcaggcagatttttaaataggggcaaacaaacagacacataggagatgctaggcatggggtccccactaggatgctgcttagaaacatgcaggggtggtgagtactcccaaagtacacttcattcctagctcagtgattcttatctgagtgttaaagttccttcttcagcaccccgttccacagtccaactgggaactttaagacctttcttggagtctttctaggaactcaagtctgctacttatacagaacagtggctttggtccccagttgtgccttgcagtatttttgtgttcaggaagaaacagtagctcttggataaagaagctagctagaaactctgttgctatggcagtgcttcaaaatgtatttccttaaatgctttctttgtaactatcttcatttagttcatctctcagataatgagagatcagagtcccatccccagtataatactcttctttagggtactttcaccatcttcagtctaaacacagactagactttcaattataatgtgtaagatttaaaatgttattattgtgtgactttgaatatctgtgtaaatctactatctcctctttggtatatacgtgtgtttatttttttctggagatctgtaactgaaatgcttaatttctgaattgttttggatatcacaacttaataccaacataagttttgagcctttttctccctaaatctggtgtgagtctaactgaaactcaaatgaactttttaaaaataattttttcttttctttaattttttttttaagtagagacagggacgcactgttaactaggctggtcttgaactcctgatcttgagccatcctccccgacctgagcctcaccttatagagagggtcttgctctgttgcccaagctggagggcagtggcataatcacagctcactgcagcctctcgacctcctcaagcgatcctcctgccttagcctcccaagtagctgggactataggcgtccaccaccatacccagctaatttttttttttattttttgtagagacaaggtctccctatgttgcccaagttggtctcaaactcctggactcaagcagtcctctcacctcagggtcccaaagtgctggggttacaggtgtgagccatggcacctggccagaacttctagtaaaaagaatattgttgccgggtacggtggctcacgcctgtaaccccagcactttgggaggccaaggcaggcgaatcacctgaggtcgggagctcgagaccagcctgaccaacatggagaaaccacatctctactaaaactacaaaaaattagccgggcgtggtggcacatgcctgtaatcccagctacttgggagctacggtgcctggcctagtttattatttcttaatatctgttgtcttccagtgtcttccttaattcttcacaataccctgtacaatgcttagcacacagtgggcagtctgtaagtttattaaatgtttggtgtggcccatacttcctatccacaaagaatgtaacatgttaagacatctagatgagggaatgatttaagaggaactacaataatattctgaaacttggactctggatctctgcatttagactttcctaaaccagccagcaagtagatcatcatgtcacaaggcttaggttgggcttgctgttcagagaatgaattaaggattaaggagaaaaaaaagcagaaaggttttgctctgtttttcaggttctattgagttgttaacttctaacaagttatcttatttgcttcattgcatgaggcccattgtagtaagaagaggaatttatatgctaaatgttctggtgatagaatgacttttctttttttttacagtccaaaggtcttttttttttttttttaacacctattatgccatgaattcatagggaataggttccagctgctcaggctccttcccattggttctcacaaagtgtgcttctctgggtggagcaggctggtgcttcagttgaacccacgtacctttctctttggcttctttctttttctgatcattttccttcacgcgtttcaggaagctgtcttggctcttagagtgtttaatgtgctcaatacgcacattaattctcttggcaagaatcttgcccttaacttgtttacagcgatgccaacagcatgctgggtcacgttgtagacttttccagttttgccatggtaacacttgtggggcattcctttttgaacagtacccgttcccttgatgtctacaatttcacctttcttacagattcgcatatacatggccaaaggaacaactccatgttttctaaaaggcctagagaacatatatcaggtgcctctcctctttccctttgtgttcgtcattttggcaaattactgaaagatggtggttctggccaaaaggaggaatgactttttaatagctgtgtttgtatctgagccttccctctgcctttcattttttttgttttgttttgttttgtttttgtttgagatgaagtttcacttttgttgcccaggctggagtgcaatggtgtgatttcggctcattacaatgtccgcctcagcctcctgggtagctgggattacaggcacccgccaccacgcccagctaatttttgtatttttagtagagacagggtttcaccatgttggccgggctggtctcaaactcctgacctcaggtgatctgtccacctcggcctctcaaagtgctgggattgtaggcgtgagccacatcacctggccacttttttaactctttccaatggttaattccgtttgatatggttccttggaacttgcacattaccctttatcaattatcaccctgtattgggggtggggaggatgatacctctcttcatagttagatcctacttactttcaacagagttcttaacaatcctagaaactcacaggtccagaaaagacaagcataaaggaaactataaataatgcatttgaagactaactcaggaaatcaatgattatttccccccaggctacccagtgtcttaaaaaaacagtttaattaatacaatcttttgtttcaattttctacctatatttatggcttttagcttttctaataaaagctcaaaatgaattacagtcatcagtgactttttaatgaatagaagacttttgcaatttttaactatttgtttttacttattaaatatttccgccttggccaggcatggtggctcacgcctataatcccagcactgtgagatgccaaggcaggaggatcacttgagtttaagagttctagaccaggctgggtatggtggctcatgcctataatcccagcactttgtgaggccaaggttggcggatcacctgaggtcaggagtttaagaccagcctggccaacatggtaaaaccccatctctacaaaaaatacaaaaattagccaaggggtggtggtgggcacctataatcccatcttcttgggaggctaaggcaggagaatcgcttgaacctggaggcagaggttgcagtgagccgagatcatgccactgtattccagcctgggtaacagagcaagactctgtctcaaaaaaaaaaaaaagtttgaaaccagcctggtcaacacagcaagacacccatctcgttgaaaaataacggtcgggcgcagtggctcacgcctgtaatcccatcactttgggaggccgaggcaggcagatcacctgaggtcgggagttcgagaccagcgtgaccaacatggagaaaccccatctctactaaaaatacaaaattagttgggcgaggtggtgcatacctgtaatcccaactacttgggaggctgaggcaggagaacagcttgaacctgggaggcagagaggttgtggtgagccaagatcatgccattgcactgcagcctgggcaacaagagcaaaactccatctcaaaaaaaataaataaataaaaataaataaataagtacttctgcctttaagccacttcctagaaggcagtggcacaaagtgatacatttggaggagtaaatatattacaaaatgaattaggctgggcgcagtggctcatgtctgtaatccccgcactttgggaggccaaggcgggtggatcacttgaggtcaggagttcgagactagcctgatcaacagggtaaaatcccatctctactaaaaataccaaaaaaactagctgggcgtggtggcaggcacctgtaatgtcagctactaggaaggctgaggcaggagaatcgcttgaacccaggaggtggaggttgcagtgagccaagattgcaccattgcacttcagcttgggcaacagagtgagactccgtctcaaaaaaaaaaaaagaactaacatgccagaactttgccttcagtatgttttgtgatttttcccttcttgtgccatttcatcattagttccatgtattatttaagatttcttatcaaccagcaccttgggatttttttgtgtatgtgttggtttagggggtttatttgtttttttcttttttttcggtaattgaaaatgtgaagcaaaatgtcacctgttttttctttcatgtctgacactcatgtcttgtttacccccgacatgcagaagctgaaatccccatttcatacagtcttcaatgtggaggcagtagggatggagaaaataatgtactttgtgctctccggtactctttctttcctattgtctgaggggatttgggcataatttattttgctgcagagataaaaatttgttatatatattttttatcattcagggccaaggaatatagattttttttttcagccttgtctcagctgggtgtctttatttactctgtcttaaagtgttccttttattatcattattattttttaatcattgaattccatttggtgctagcatctgtctgttgcattgcttgtgtttataaaattctgcctgatatacttgtttaaaaaccaatttgtgtatcatagattgatgcttttgaaaaaaatcagtattctaacctgaattatcactatcagaacaaagcagtaaagtagatttgttttctcattccatttaaagcagtattaacttcacagaaaagtagtgaataccctataagccagaatccagaaggcctttctgctgacaagtttgaggtgtctgcagatagttctaccagtaaaaataaagaaccaggagtggaaaggtaagaaacatcaatgtaaagatgctgtggtatctgacatctttatttatattgaactctgattgttaatttttttcaccatactttctccagttttttgcatacaggcatttatacacttttattgctctaggatacttcttttgtttaatcctatataggttttttgaacctataacataagctacaacatgagaaatgtgcggttagatagatatgtcccttctgaaggtcagaaaaaaatataatggaggtaaaacctgaacaagcttggaaactgatggtagacttcttcaaggcagcccttgccctaattaaaattcttgtctttctagaaaaagtctagctgttgatttaccacagaaaataataataataattactattattattattttttgagacagggtcgccctgtgtcacctagattgcagtggtgcagtcatggctcactgcatcctccgtttttcaggctcaagcaatcctcccaccttagcctcctgagtagctgggtccacaagcatgcgccacccacacccactaagtttttgtatttttggtagagatggagttttaccttgttgcccaggctggtctcaaattcctggactcaagtagtccgcccgccttgccctcccaaagccagaaaacatttagaatatctttcagagatgtgtatttacaccactattaacacagggctgtatagcagtccagtactggactatgtagtccagtactattcttttccttactggagggccaggcgtggtggcaggtgcctgtaatcccagctactcaggaggctgaggcaggagaattgcttgaacctgggaggcagaggttgcagtgagctgggaccgtgccattgcactccagcctgggcgacagagcaagactccgtctcaaaacaaaaaaaaaaagagagagagagcagtaattcaggtctcacccatcttcaatccagggggcctagccttagtatttgacccatagtaagcacccaataattgtttaaattaattaacctctgaggccctttaaatctgttgataagtatcttattttgcaaagtcctaagcacttggaagagcagaggaactatttactgggtgtgtatgcttttctaacaatattttatagctggcttttgtttttagaatgaatttgaacattgaaaaggcaggcaatagggatgattctgtgaattctgctaaaactgagtagaaagaatgagtgtagagatgtcgacattgatcaactttctatcttcataagagatctgattctaacatatccatttagactcaagtagaatattgtgtatagagtgagtggcagtgagtaatttggtaaaaatttgctgacctgcttttattctttcctcctttctttcttcctttccttccttccttccttccgtcctttcctttcctttccctcccttccttccttctttccttctttctttcctttctttcctttcttcctttctttccttcctcccttccttttcttttctttctttcctttccttttctttcctttctttcctttcctttctttcttgacagagtcttgctctgtcactcaggctggagtgcagtggcgtgatctcggctcactgcaacctctgtctcccaggttcaagcaattttcctgcctcagcctcccgagtagctgagattacaggcgccagccaccacacccagctactgacctgcttttaaacagctgggagatatggtgcctcagaccaacccaaccccatgttatatgtcaaccctgacatattggcaggcaacatgaatccagacttctaggctgtcttgcgggctcttttttgccagtcatttctgatctctctgacatgagctgtttcatttatgctttggctgcccagcaagtatgatttgtcctttcacaattggtggcgatggttttctccttccatttatctttctaggtcatccccttctaaatgcccatcattagatgataggtggtacatgcacagttgctctgggagtcttcagaatagaaactacccatctcaagaggagctcattaaggttgttgatgtggaggagcaacagctggaagagtctgggccacacgatttgacggaaacatcttacttgccaaggcaagatctaggtaatatttcatctgctgtattggaacaaacactttgattttactctgaatcctacataaagatattctggttaaccaacttttagatgtactagtctatcatggacacttttgttatacttaattaagcccactttagaaaaatagctcaagtgttaatcaaggtttacttgaaaattattgaaactgttaatccatctatattttaattaatggtttaactaatgattttgaggatgagggagtcttggtgtactctaaatgtattatttcaggccaggcatagtggctcacgcctgtaatcccagtactccaggaggccgaggcaggtggatcagctgaggtcaggagttcaagacctgtctggccaacatggtgaaaccctgtctctactaaaaatacaaaaaaattaactgggtgtgctagtgcatgcccgtaatcctagctactctggaggctgaggcagcagaatcacttgaacccgggaggcggaggttgcggtgagccaagatcacaccactgcactccagtctgggtgacagagcaagactccatctcaaaaaatatatatatatatatatacacacatatattttatttcaactgttagacaagagtccaaaggccaaagaataaagttttaggccagtcctttattagaaaatgagtcaaatcccaaagcaagtttttttatgagttaatgaatataaatgactacatattttatgccttaaaaatcacttttaatgaatggtgttttatggcttgtaaatcagagttttaatcagtaaagaaagtttttaatcctcaaaaacacgttatcataaaagacactgtttggcatcaaatgtggtatttggccatgttcattagggtcattttaggaatctcatacattctacttagctatgcttaattcctgataccatggcattttctgaaatgtttcaaggatgacatctctgctgtttttaatttggtaatgatatctgctgatttattaagtgaaaaaagtaatggtgtcattaccttggatgaagaaacaaaaataaagcatttgccacatttttcaactttgttttcctttcttacaaaattgctataagctcattgcccccaaattggacaatatagggaataaaaaagataatttggggtggggttagacacgggtcttgttatgttgccgaggctggtctctaactcctggcctcatgcaatcttcctaccttggcctcccaaagtgctgggattataggtgtgagccacttcaccaagctgagatgccacctcttaaaagagagaataaggacagattacagccactgctcatgcctgtaatgtcagtactttgggaggccaaggtgggagaattgctcgaggccaagagttcaagaccagcctgggcaatgtagcgagacctgatctctatgaaaaggggggtgggggggaaaactagctggggccaggcgtggtgggtggcttacgcctgtaatcccagcactttgggaggccgaggcgggcagatcacctgagggcaggagttcaggaccaacctgaccaatatggagaaaccctgtctctactaaaaatacaaaattagccaggcttggtggcttatgcctgtagtcccagctactcgggaggctgaggcaggagaatcgcttgaacctgggaggcagaggtttcagtgagctgagatcgcgccattgcactctagcctgggcaacaagaatgaaactccatctcaaaaaaaaaaaaaatcagctggaaggtggcaaacacctgtggtcccagctactcaggaggctgagacaggaagatcacttgagtccaggaggtcaaggctgcaggtgagccatgtttgtgccactgcactgcagcctggatgacagaccgagacccttctcaaaaaaaaaatttttcccggtatttttttttgggggggggtttaattcttgttgcccaggctggggtgaattggggaattttgggttaagggaaccttcggcttcctgggttggggggtttttcctgtttaggcttccccagtagctgggattacaggcatgcaccaccacgcccggctaattttttgtatttttagtagagacagggtttctccatgttggtcagactggtctcgacctcttgacctcaggtgatccgcccaccttggcctcccaaagtgttgggattacaggcctgagccaccgcacccggcctgtactcttattctttaataataaaatatttctgtgtttctttagtcattttacataaacttttatttatttatttatttttatttatttatttttttgagacggagtctcgttctgttgcccaggctggaatgcaatggctcaatctcagctcactgcaagctctgcctcccgggtacacgccattcccctgcctcagcctccctagtagccgggactacaggcgcccgccaccacgcccagctaatttttttttttgtattttcagtagagacagggtttcactgtgttagccaggatggtcttgatctcctgacctcgtgatccacccgtctcggcctcccaaagtgctgggattacaggtgtgagccaccgtgctcggcccataaacttttatttttaaaataatgtcatgataaataatattgcttaggtgtctttaatatattagtaacatttctgttttattgtacatcaacatttatattcaaattaatgggtgaagagtactccattggactaggtatatcgtaatttaatctcctattattggacaactacattgtttctaaaattatactattcctatgactaaacctttgcatatatcttttatctccctaggatatatttctaaaactagcattgttgactgaaagtgtaaatacgtgttaaggtgtttgctacataatgccatatttcctttttaggaaactaagctactttggatttccaccaacactgtattcatgtacccatttttctcttaacctaactttattggtctttttaattcttaacagagaccagaactttgtaattcaacattcatcgttgtgtaaattaaacttctcccattcctttcagagggaaccccttacctggaatctggaatcagcctcttctctgatgaccctgaatctgatccttctgaagacagagccccagagtcagctcgtgttggcaacataccatcttcaacctctgcattgaaagttccccaattgaaagttgcagaatctgcccagagtccagctgctgctcatactactgatactgctgggtataatgcaatggaagaaagtgtgagcagggagaagccagaattgacagcttcaacagaaagggtcaacaaaagaatgtccatggtggtgtctggcctgaccccagaagaatttgtgagtgtatccatatgtatctccctaatgactaagacttaacaacattctggaaagagttttatgtaggtattgtcaattaataacctagaggaagaaatctagaaaacaatcacagttctgtgtaatttaatttcgattactaatttctgaaaatttagatctagataaagctatagtgtggattattttatgtatatttacttgagaaaataattattaaatattagtggaaaagctatactttgggtatgatataggactttcgaattggaattttcctttctatctgtaaaagcaagtaggtatagttttattccccagaaggcatctttttctcccccttgtctcacatgggtgaatttaccagcatatttaactaaattcagactggttccaaatgtactgccagatagtagcatttctctagtgtttgttttcatcctggcttgtaagaatgccctgccacttctgccctgcaatatcccttgctattaggattttggcatcaccttgggtccttaatgccagaaatgggaattgcttcatactgtggaaaaatacccattaaaatattaagaccagtaaaacctcgtttctgcttgggctatttgtggatttcagacatcctgagaagtttaccacccctgtaattaattgtcattgtcatcacttcataataaaaataattgcatggccgggcatggtggctcaagcctgtaatcccagcactttgggaggctgaggtggtcagatcacctaaggtcaggagatcaagaccagcctgaccaacatgaagaaaccccatctttactaaaaatacacaattagccgggcgtggtggcgcatgcctataatcccagctactcaggaggctgaggcaggagaattgcttgaacccgggaggcggaggttgcggtgagccgagattgcaccattgcactccagcctgggcaacaagagcgaaactctgtctcaataataagaagaagaattgcgtgaatatttctttaaaactatgatgagataacataccagattatcaaatggattcagtagtgggtgtgccatttattgcacactgagagatgaccaagtcattctgaaatatctttattaatatatccttcctaggatttttcatcctaacttctccataggtagttacttagcataacatctctgtggccagatgtatcccactactaaaagggcaaagtaagctgtggctgccctggtagatacaatgagtaagtgcacagtgatggctataaatgttttcatctcataatcccatgtccagaccagcaatttgctctgaaagctcttacctgtgtctgtttcaatggctcttgatcacttgcctgcacgtccagaattccttatttattcattgaaaattagcgttctttatccctttgttttgcaagttcagctttttagagatggctaaaatggtctaatctttcttggcaaaggcaattctgagctgcagattagactacaagtggcttgggtacatgttgtctttaaacaagcgaagaggaaaactttgagctctattcagacttggtgaagtgtggtaaatttatgatgaaagctactgactgtattacacatgattaattctgaagcccatattaagatgatcttttcagcagttcagcattgctcttctaactgaacagtttcaaggctgggatttcagcaattaatcagttcagaattgctaatgatctggcggagggtggtagcaaaagggggaggatgtcattagcttctctagcctgccttttttcagtgccctgtggcagtatggagtgaggcaacatgaaagaaagatggcctgaccttcatggcagtattgtgcaacacgtaaatactggtgtgagtggctgtggctatggctagtaaatgatggcccttggtaaacaaagttatttatcagacaatacctaccagctaggtcaactgtgcccataattgatctggttaatttcttttgctgcctattgatttttatttggttgatagataatagctagaggactctaaatttctttggggaagaacatgaaccccttctaagccttcttacgagagaattgatcgcttttgcactgacctttagtaacatcctgatttcagtgttttgtaactatcagagggttgagtcttggttttaagccatgtatatctgtagcataactttctgtgtaggctagttacctctcagcttataaagtgtaggctgataaatttatagtacagtagagtgtcactatgcaaagaaacgatcttagggaatcgaatgatatctgctattaaagcaaaattaatatatattttttctttttacttttttttttttttaaagacatgaaatctcactgtattgcccaggctggtcttggtctcagactcttgagctcaagcagtcctcccacctcagcttcccaaagtgctgggattataggcatgagctgccgtgtctggcccagtatatattttttaagttttaagttttgtggtacgtagtaggtttataatattattttgaatccttagttgtaattttatgtctgctgatgtgtacataatttttattaaactatttatttgagacttcaggtatcttttttttttttttgagacggagtctcgcactctcgcccaggctagagtgcagtggcgccatctcggcttactgcaagctctgcttcctgggttcacgccattctcctgcctcagcctcctgagtagctgagactacaggtgcccgccaccacgcctggctaattttttgtatttttagtagagacagggtttcaccgtgttagccaggatggtctcgatctcctgaccttgtgatctgcccgcctcagcctcccaaagtgctgagattacaggcgtgagccaccgcgcccagccgagacttcaggtgtcttagaattttttaaatgtaccctttctgagaaaaacagagacttaaagctaggataactggtattctattttttttttttttttttttttttacctccagcctgggtgacagagcaagactctgtctaaaaaaaaaaaaaaaaaaattcactttaaatagttccaggacacgtgtagaacgtgcaggattgctacataggtaaacatatgccatggtggaataactagtattctgagctgtgtgctagaggtaactcatgataatggaatatttgatttaatttcagatgctcgtgtacaagtttgccagaaaacaccacatcactttaactaatctaattactgaagagactactcatgttgttatgaaaacaggtataccaagaacctttacagaataccttgcatctgctgcataaaaccacatgaggcgaggcacggtggcgcatgcctgtaatcgcagcactttgggaggccgaggcgggcagatcacgagattaggagatcgagaccatcctggccagcatggtgaaaccccgtctctactaaaaaataaaaaaattagctgggtgtggtcgcgtgcgcctgtagtcccagctactcgtgaggctgaggcaggagaatcacttgaaccggggagatggaggttgcagtgagccgagatcatgccactgcattccagcctggcgacagagcaaggctccgtctcaaaaaaaaaaaaaaaaaacgtgaaaaaataagaatatttgttgagcatagcatggatgatagtcttctaatagtcaatcaattactttatgaaagacaaataatagttttgctgcttccttacctccttttgttttgggttaagatttggagtgtgggccaggcacggtggctcacacctgtaatctcagcactttgggaggccgaggcgggtggatcacctgaggtcaggagttcgagaccagcctggccaacgtgttgaaaccccgtctctactaaaaatataaaaattaggtgggcgtggtggcaggcacctgtaatcccagctactcaggaggctgaggcagcagaatcgcttgaacccaggaggtggaggttgcagtgacccaagatcgcaccattgcactccagcctggggacaagagcgagattcttgtctcaaaaaaaaaaaaaaaaaaaaaaggtttggagggtggtgagctgagatagtcaactattaactcctatctacctgctgggactacactggtgaggtggagcctaagtcctaaaacaacaagtgaggcagctggacgcggtggctcgcatcagtaatcccagcactttgggagcctgaggcgggcagatcacaaggtcaggagttcgagaccagcctggccaatatggtaaaacccagtctctactaaaaatacataaattggctgggcgtggtggtgtgcacctgtaatcccagctacttgggaggctgacacagaagaattgcttgaactctggaggctgaggttgcagtcagctgagatcctgccactgcactccagcctggcgacagagtgagactctgtctcaacaacaacaaaagaaagaacaagtgaggcaaaacctggagaccccagcttcatgtaacacctagtttgagtattgttgagagtttttcaggaaaaaagtctgataacagctccgagatagtcttaacatatgaaaaagcaaaaaagggaggagacagatcatttgtcctatacctttctcttttaaggttttaattataacttgtgtaatacaggagacctctgggtgtttttagttgactataaactaaatctgagtacacatttcagggctgctaaaaatgcttatttgaaactgggccgtattaacacaagcagaggctctggagcaagtgaagtacagatccagagccccactgtattctccaatggagtgattgcctgaaagatgatgtcagttttaagcaccgtgcttggtttttaacatggtcactgacaaattggagagtgtttatccagaggtagatggtaaagatacataaaagtaacttgaaatactgtcttttgaagaagaaatgagaagatttaaggaaataagacactgtcttcaagtatctgaagaaccgttacccggaagagaactgttatctggaacaggattaagactcactcatggggctccagaaagcagacgagtgcatggaggacgcagaagatgcagattgtgtggctcaactctaaaatctttctaacaaaattagttctctggatgtgttccagttcacttgatgatgattcttttgtttttgtttttgtttttgaggtgtagtttttcactcttgttgcccaggctgctggagtgcaatggcacgatcttggcttgctgcaacctccccctcccgggttcaagcgattctcctgcctcagcctcccgagtagctgggattacaggaatgcaccaccatacctaattttgtatttttagtagagacagggtttttccatgtcagtcaggctggtcttggactcccgacctcaggtgatccacctacctcggcctcccaaagtgctgggattacaggtgtgagccatcgcgcctagcctatgatgattcttttcacagagatacaggcacttaaggagaggatctaaaccccttggacacattgccgttgaacttctaagatcttaggtttccacttactcatgaaaattataccacagggtcagagggtagtgttcattggagccaggtgccagaacaagttattacaaactactattttagagaaaaatgtcattaaagtttaagataccttaagctataggtttgcatcaaagttaatgaaaggtaaaaagatgccaagcgtggtggctcaggcctgtaatcccagcgctttggggggccaaggcgggcagatcacgaggtcaggagatcgagaccatcctggctaacacggtgaaaccccatctctagtaaaaatacaaaaaattagccgggcatggtggcgggcatctgtagtcccagctactcaggaggctgaggcaggagaatggcatgaacccaggaggcagagcttgccgtgagctgagatccagccactgcactccagcctggctgacagagcaagactgcatctcaaaaaaaaaaaaaaaaaaaaatgcaaatcaaatctaaagtagttcagtctttaaactcaaagccaatacatttgctttgaactacaaatgaactgaagtttttaagtgtaataaatgttactaaatcggcttttgtagcagttaaacaaaaaacttcaaaaattgtaaggattctgtgagggagcatggctgctgctgctgctgctgcttgcagatagcctgctgtgtttaggatttagttaaatacatttctcctgtttaaaactaaatggtctttccttagtttgcttagttcttcagaagggcctttgaaacactgggaaataaacaagtgattctttagctactgctttctgaaatacttatataaaagctctgcactgtattctcccatccctctcaggggaatattagagggttaggactccccaggtagacattctaggggtgaaaatttgtcattacattgacatttcagatttaggttttcaacaatactgttttcttctttcacatattgccatctagtaatatagatgttctccgtccacattaatcaaaactattgacatggataattcctaattccttgaacactataatggagatctatagctagccttggcgtctagaagatgggtgttgagaagagggagtggacagatatttcctctggtcttaacttcatatcagcctcccctagacttccaaatatccatacctgctggttataattagtggtgttttcagcctctgattctgtcaccaggggttttagaatcataaatccagattgatcttgggagtgtaaaaaactgaggctctttagcttcttaggacagcacttcctgattttgttttcaacttctaatcctttgagtgtttttcattctgcagatgctgagtttgtgtgtgaacggacactgaaatattttctaggaattgcgggaggaaaatgggtagttagctatttctgtaagtataatactatttctcccctcctccctttaacacctcagaattgcatttttacacctaacgtttaacacctaaggtttttgctgatgctgagtctgagttaccaaaaggtctttaattgtaatactaaactacttttatctttaatatcactttgttcagataagctggtgatgctgggaaaatgggtctcttttataactaataggacctaatctgctcctagcaatgttagcatatgagctagggatttatttaatagtcggcaggaatccatgtgcagcaggcaaacttataatgtttaaattaaacatcaactctgtctccagaaggaaactgctgctacaagccttattaaagggctgtggctttagagggaaggacctctcctctgtcattcttcctgtgctcttttgtgaatcgctgacctctctatctccgtgaaaagagcacgttcttctgctgtatgtaacctgtcttttctatgatctctttaggggtgacccagtctattaaagaaagaaaaatgctgaatgaggtaagtacttgatgttacaaactaaccagagatattcattcagtcatatagttaaaaatgtatttgcttccttccatcaatgcaccactttccttaacaatgcacaaattttccatgataatgaggatcatcaagaattatgcaggcctgcactgtggctcatacctataatcccagcgctttgggaggctgaggcgcttggatcacctgatgtcgggagttcaagaccagcctgaccaacatggagaaaccccgtttctactaaaaatacaaaattagccgggcttggtggcacttgcctgtaattccagctactcgggaggctgaggcaggagaatcacttgaacctgggaggcgggggttgcagtgagctgagatcgcatcattgcactctaacctgggcaacaagagcaaaactccatcaaaagaaaaaaaaaatcgggtgcagtggctcatgcctgtaatcctaacactgtgggaggccaagacaggcagattgcctgagctcaggagttcgagatcagcctgggcaacatggtgaaaccctgtctctactaaaatacaaaaaattactcagcgtggtggcatgcgcctttagttccagctactcaggaggctgaggcaggagaatctcttgaacccgggaggtggaggttgcaatgagccaagatcgtgccactgcactccaacctggcaacagagcgagactccgtcttaaaaaaaaaaaaaattttgcagcgcaaaccaggatatcctctgttctcatttgttctagatttcaaaagaaacagtcctttctttggggaaaagagaaaggaaaaggagttttataaaaggaaagaaaagattcataagaacaagaagtgggcccacttgcatatacctttgtagaaaactgttcactgttgttgaagaaaagctcttcatattaatatgcagtccagatgcagtggctcacacttataatctcagccctttgggaggctgagacaggaagattacttgaggccaggagtttgaaaccagcctgggcaacatagtgagactctgtctccacaaaatttttttttaattagccgggcatggcagtgtgcttctgtagtcttagctactgaggaagctaagccagaagaatcacttgagcccaggagttcaaggctgcagtgagctatgatcataccattgcactcttgcacttgcacagagcaagaccctgtctcttaaaaaaaaaaaagtgtgtgtgtgcatatgcatatatacatatatatacatgcaaatgtatctgtttataattcagattgcttcaaaaagatgttgcactttatgatactgagaacagtgagaagtaaataagatagagtgtaggaggaggaataatttcagaacagccatctgagaacttctgtgacaacagatcaggcaaaatgaaatgtgaaagtaattttataggccaggcgtggtggctcatgcctataatcccagcactttgagtggccaaggcaggtggatcacttgaggtcaggagttcgagaccagcctggtcaacatggtgaaaccttgtctctactaaaaacacaaaaaaattagtcgagcgtggtggcatgtgcctgtaatcctagctgctggggaggctgaggcaggagaatcacttgaacccgggaggcggaggttgcagtgagcctagattgcaccactgcactccagcctgtgagacagaatgagaccctgtcttaaaaaaaaaaaaaaagtaattttataaactattgtgcacaattcgatgtattcataattaattaaatgattatttttgttggttttaacttttattcagtggctatttattgggagcctactgtgttctgggcactaggaatgcaacagtaaataagactaactaagtccctggtaggattcaggttctgtcgaggggagatacacaataaagatgaatttaagataacaataaatgctatggagaaatatacagaacagtggaatagtattagctgtcaaaggttgttgattactttcgtttaaggaggccagggaaagcctttctgaaaaaattgagctgagacctaaataacaagaaataattgtccttgaaaaatgaagggaatgcatcttataggcagaggaatagcaaacataaaggtcttgaggtaataatgagtgtggttttttgatttctgtattttggtttttttgagatggtgtctccctctatcccccaggctggagtgcagtggcacaatcttggctcactgcaaactctgtctcctgggttcaagcaattctcctgccttggcctcctgagtagctggtattacaggcacgcgtgctaccacacccgactagtttttatttttagtagagatggggttttaccacgttggtcaggctggtctcaaactcctgaactcaagtgatccaaccacctcaacctcccaaagtgctgggatcacaggcgtgagccaccatgcccggccagagcttggtttattttttaaaagataggccaatgttggtcgtgtgtggtggctcgtgcctataatcccagcactttgggaagccaaggcaggcaaatcacttgaggtcaggagttcgagaccagcctggccaacatggtgaaaccccatctctactaaaaatacaaaaaactagcatggtgtggtggtgtgtgcctgtaatcccagtgcctgtaatcccagctactccagaggctgaggcaggagaatcacttgaaccgaaaggtaggagttacagtgagccaagatcgcatcactgcactccagcctgaacgacagagcaagactcctgtctcaagaaataataatgataaaaggttcgggcacagtggctcacacctgtaattccagcactctaggaggccgaggcaggcagatcccctgaggtcaggagtttgagaccagcctggccaacgtggcaaaaccccatctctactaaaaaatgcaaaaattagctgggcacggctgggtgtggtggctcattcctgtaatcccagcactttgggaggtcaaggcggacagatcactgaggtagaaaccctgtctctactaaaaatacaaaaatttgcccagcgtggtggcgcgtgcctctaatcccagctacacgggaggctgagacaagagaatcacttcatcaacccgggaggtggaggttgtggtgagctgagatcgcaccattgcactccagcctgggcaacaagagtgaaactccatctcaaaaacaaaaaaaaattagctgggaatggtggcatgtgcctgtaatcacagctacttgggaggctggggcaggagaatcgcttgaacccaggaggcggagattgcagtgagctgagattgcgccactgcactccaggctgggcgaaagagcaagactccgtctcaaaaataataataataataataataggccagtgtagctggagtaatttgcaaattatgtgtggaggcagagattacacaaggaatgggagaaggtcatagatgagggccagatcacatagtatttggtggtaaggaattcagattttatccttgtggtaattggtggtgtggagatggttaaaaacaaggttggtttgggatgggtttgaagagaggacttgctaatggattaaatttggaggataaggtaaagagaaattgaaggagtgacacttgggttttggcttgaacaatagatcttgttagtaatattaaattagatgaagaaggcatggtagggaatatgggggagtgggaaaggcaggaagcaggaatggaaccaggaactctgttttagatgtgagaatttgttgttgttgttgttgttgttgttgttgttgttgttgttgttgtgacagcatctcgttctgttgcccaggctagagtgcatggagtgcggtagcacgatctcagctcactccaacctccgcctcccggttcaagtgattttcctgcctcagcctcccgagtagctgggattacaggcacctgccacaatgcctggctaatacttgtatttttagtagagatggggttttaccatgttggccaggctggtcttaaactcctgacctcaggtaatccacccacctcggcctcccaaagtgctgggattgcaggtgtgagccactgtgcccggccagatgcatgaattttgagatgtatactagacttctggatagagaagttaagtaggcagttggacacattgtatgaagctcaggggtacaaggaggactatgaacatgggagtcttctgacaaatttatcactagactcctcattcaagtaactaggaaatgtcagatattcttcccctagtaatagccagtggttatactcttgcctttagttttcttcacaatactcttggcaacacataaggccttccctacaatctgagtttcagtcagaattgtttctgagcgttcttcctcaaatttctccccagtctcattattctttattctcatgtccatgaccagtcataatagtaattatgaaaaacctctaactttctttagtgcattgaatgtatattttatcattttggttgtgttaactgtaaatctctcagtggaaatctgaaaagcctttatttccttagatgataatatacaattgatttaggagatagggaatttttcagttacctttataacagcacagtattagcagtctaatctaaatgctaagtgaatgttttgagaggagatagatgttgaaaattaaaatacattaagtcccagtgaggtgaaaagccgattgttaagttctgcacacaaaagatttgcttcagtgaattgatttcaacagctgagatcctagtcatttcacctggtctaccaaaaagaatgattttacttgcttttggtcaaatctctgcccagcaattctttttctttctttcttttttttgttttatgtgtgtgtgtgtgtgtgtttttttttagcagagtctcactttgtcacccaggcgggagtgtggtggtatgatcacagttcactgcagcctccaactcctgggctcaagtgatcctccagcttcagcttttcaagaaattgggactgcaggcacatgcaactatgcctggctgaggttttatgtatcttttttctagagaaggggtctcactgtgttgcccagctgggtctccagctcctggtctcaagctgtcctcctgcctcagcctcccaaagtgccaaagtgctagggttataggtgtgagccattggtgcccagctactgcctgcctggcaattctgaatgccttaaattttttttttttttttttttttttttgagacagagtttcactctgtcacccaggctggagtgcagtggcatgatcgtggctcacagcaacctctgcctcctggattccagcaattctcatgcctcagcttcccgagtagctgggactacaggtgcatgccaccacgcccagctaatttttggtttttttgtttgtttgtttgtttgttttgagacggagtctcgctcagttgcccaggctggagtgcagtggcgtgatctccgctcactgcaagctccgcctcccgggttcacgccattctcctgcctcagcctcccgagtagctgggactacaggcgcctgccactacacccggctaatttttttgtattttaagtagagacggggtttcaccgtgttagccaggatggtctcgatctcctgacctcgtgatccgcctgtctcggcctcccaaagtcctgggattacaggcgtgagccaccacacccggcctaatttttttttttttaattttatttttaattttttgagatgcgagatggagtctcgctctgttacccaggctggagtgcagtggcaccatctcagctcactgcaacctccacctcctgcattcaaaagattctcctgcctcagcctcccaagtagctgggattacaggtgcctgccaccacgcccaactaattttttgtatttttagtagagatgaggtttcaccatgttggtcagactggtgtcgaactcctgacctcaagtgatctgcctgcctcagtctcccaaagtgctaggattacaggggtgagccactgcgcctggcctgaatgccttaaatatgacgtgtctgctccacttccattgaaggaagcttctctttctcttatcctgatgggttgtgtttggtttctttcagcatgattttgaagtcagaggagatgtggtcaatggaagaaaccaccaaggtccaaagcgagcaagagaatcccaggacagaaaggtaaagctccctccctcaagttgacaaaaatctcaccccaccactctgtattccactcccctttgcagagatgggccgcttcattttgtaagacttattacatacatacacagtgctagatactttcacacaggttcttttttcactcttccatcccaaccacataaataagtattgtctctactttatgaatgataaaactaagagatttagagaggctgtgtaatttggattcccgtctcgggttcagatcttagctgataagtggaagagctgggactttaagcagatgagaatctaaagactttgctcttttcacttcactggggtgtctttctctctctctctcttgctctctctctctctttttttttttcccaagacggagtctcactccattgcccaggccagagtgcagtggtgcgatctcagctcactgaaaactcatcttgcccaggctggtcttgaacccctgaccttgtgatcctcccgccttggcctccccaagtgctgggataggcgtgagccaccgtgcccagccaataatagctaaaatttatataatgttcactgggccaggcacagcggctcgttcctgttatcccagcactttgggaagctgaggcaggcagatcgcttgagccaaggagttcgataccagcctgggcaacatggcaaaaccccatctctaccaaaaaaaatatacaaaaattagccaggcgtggtggcatgtacttgtagttccagctactcggaaggctgagttgagagtatctcttgagcccaagaagaggggactacagtgaacggagattgcgccactgcactccagcctagacgacagacagaagatctcaaaagaaaaaaaaaaaaaaaagatcactttatgctgggactgctctaaaggcccaaccatgttttaactaattaacaattttatgacaactctatgagctatgtactgtaattatgcctatattacagatgtgaaaattgaggctcagagaggttgaataagttgctcaaagtcacacaggtaataagtgatggaactagaagttgaactcaggaagtctagctccaagtctaaattctttgttaatttatttttcgggccagagtcttactctgtcacccaggctggagtgcagtgccactatctctgctcactgcaaccttcacctcccaagttcaaaccttgttcaattcttgtgccttggcctcccaagtggctaggattacaggcatgtgccacaacaactagctaattttttgtctgattctgttggccagtctggagtgcagtggcgcaatctcagctcactgcagtctccagctcccaggttcaagtgattctcgtgccttagcctcccaaatagctgggattacaggcacgtgccaccacaccgagatagttttttgtatttttaatagaaacaaggtttcaacatgttggccaggctggtctcaaattccagacctcagatcatctgcccgcctcaggctcccaaagtgctgggattacaggcatgagccactgcacccggccttaatttttatatttttattagagatggggttttgccatgttggccaggctggccttgatctcctggcctccagtgatccacccgccttggcttcccaaagtgctgggattacaagcatgagccactgcacccggcctccaattctaaactcttaacaacaatactatagtttcttgaaaagttgttgaaggcttcacggagggaaaaaaaatggagcattctaacaactttgcagatgagacccaagaagactcaatgactttctcctgatcatattgtagcagatgacttagccagaactctgacttcctcacagggagaaagtctgcaagatttcacacttacctgtcaggcctgagctggctgctttctcagctccctaagtgctatgttcccagtctgcttttcttcctttttcaagtgtgcactaccaggcatttcagaacatcccaggctggtcgcggtggctcacacctgtgatcccagcactttgggagcccaaggcgggtggatcacctgaggtcaggagttcgagaccagcctggccaacatggtgaaaccccatctctactaaaaatacaaaagttaactgggcgtggtggtaggcacctgtaatcctagctcaggattactcgggaggctgaggctagagaatcggttgaacccaggaggcggaggttgcagtgagccaagattgcgccactgcactctagcctggggacaagagggagacttcatctcaaaaaaaaaaaaaaaatcccagctgggcacagcggctcacttctgtaatcccagcactttaggaggccaaggcaggaggatcacttgagcccaggagttcaagactagcctgggcaacatagtaagaccctgtctctacaaaaaaatttaaaaattaattgggtgtcgtagcacactcttgtattcccagctactcaggaggctgaggtgagaagaatgcttgagtctgggaggtcgaggctgcagtgagccatgatggtgctactgcactccagcctggccaacattgtgagaccttgtctcaaaacaaaacaaaacatccttctactgagcactttctgtccctttatagaaacttaagagggaaccagtagaggtaatttcctaaggaaaactgctttgggacatgatcacaaatgaagcctggagttttgaactgctgaggtcagcctgtttttaccttctgagcctatcaagtaattgttccagatgccaagaaaagctgctggccttatttctgcttctgcctttaccacaggggagcgccatgtgagccagtcctctgtttttcctccactgtatgctaggcagtattagcaccagattcttcccctctttaaaaagaaattctagtgctttggattttttcctccatgcagaatagcaatgatggaaagtatgtggtcaaagtaatgacattctgaaaatactaaatgtcaccatagtatttttctctggaagagaaatgtatatgtagaggtgaaacttcaaatttctttttttttttttttaagacgaagctttgctcttcttgcccaggctgaagtacaatggcgtgatcttggctcaccgcaatctctgcctccagggttcaagtgattctcctgcctcagcctcctaagtagctaggattacaggcatgtgccaccacgcccagctgattttgtatttttagtagagatggggtttctccatgttggtcacgctggtcttgaactcccgaccccaagtgatccacccacctcggcctcccaaagtgctaggattacaggccaccgcgcccggcctgaaacttcaaatttctttttttttttgagacagagtctcgctatgtcacccaggctggagtgcagtggcgccgtctcggctcactaccagctccactccacctcctgggttcacaccattctcctgcctcagcctcccaagtagctgggactacaggtgcccgccaccatgcccagctaattttttgtatttttagtagagacgggttttcactgtgttagacgggatggtctccatctcttgacctcgtgatccgcctgcctcagcctcccaaagtgctgggattacaggcgtgagccactacgccaagcccgaaacttcaaatttcttatctcataactaggcatccttatcactgagtgttagcctggatataaacattcctaatcttttgtacttttcatgtcagcatttggctccacttggctgcctggggagaacttctagcattatgagcatgcaggtcctatcaacaggttgggggtgcggtttattcatacaggtagtgagagtggcacagatggatgctgtcccttaaaacaaacagacttgtctttgggagcctgaggcgggtggatcatgaggtcaggagttcaagaccagcctggccaacatagtgaaaccccgtttctactaaaaatacaaaaaattagccgggtgtggtggtgtgcacctgtaatcccagctactagggaggctgaggcaggagaatcacttgaacccaggaggtggaggttgcagtgagccgagatggcaccattgcactccagcccaggcgacagtgcaagactgcgtctcaaaaaaaaaaaaaaaacacacagacttgtcctactgccatttcttttcactctggcggtaaagtaagagtgtgtgtgtgtgtgtgtgtgtgtgtgtgtgtgtgtgtgtgtgtgtgtgtttctgtccgtctgtctgtcaagggggagggtgaccactttctaaaaggccatccgtgtatttttagcttcctgatttttttctctatcgcagtctctttgaagccaggtgaattttaggccttggcaattttctttttattgcaatgggaaggtcaagacactgagagtcacccaaaacatatccatccaaaatgatacaattttagggtttatttttaagtgatacccaagttatttgctaagaacctatgccagtgtgtttatgagaatttgcactgtcccacactgttgccaccagccacatgggactgtttaaatttaaattttacaaattagccagtcatggtggtgtgcacttgtagtcccagctacttaggaggctgaggcaagaggattgcttgagcccagaagttcaatactgcagcaagctatgatcgtgccactgtactccagcctgagtgacagaatgagacctcatctcttcaaaaaaaaagaaaaaaattaaaatatgaagtttagttcttcattcaccctaaccacatctccagtgctcaataactatatgtgactcatggctaccttattagcatagatatagaacattgtgactatcacagaaagttgttttgaacagtgttgccaagccctgtaagtggaagaggcagtgcagtgtgatctgtgtcttcaggaaaccaggtagtcagactagttcaatgaggagaggcagaacctggcttcacttctagattaaaaactgcttaggtggcctaaagatacaatggccattctcagagtagtgagaaggaaggaacagatgtttagggggctagaagaaagtcagagagggccgggcgcagtggcttatgcctgtaatcccagcactttggaaggccaagacaggcagatcacgaggtcaggagttcgagaccagcctgaccaacatggtgaaaccctgtctctactaaaaatacaaaaattagccgggcgtggtggtgcgcgcctgtaatcccagctactcaggaggctaaggcaggagaatcgcttgaaccctggaggcagaggttgcagtgagcccagatcgcaccactacgctccagcctaggtgacagagagagactccgtctcaaaaaaaaaaaaaaaagtcagaggagacaaggagcatgtacacctaaaatcaacatagacccctctgttgatggggtcatagtgagtacttgaggtaccaagtctggataaacatcaaacttcagccaataactttgagtttctagccatccaagcctcttattaaacatacagaaggaccttttttcccttgcatctaacaagttaaagcacctgcagagatcattagggaggagccttggcctgattggtgacaaaagtgagatgctcagtccttgaatgacaaagaatgcctgtagagtgcaggtcaactacatatgcacttcaagaagatcttctgaaatccagtagtgttctggacattggactgcttgtccctgggaagtagcagcagaaatcatcaggtggtgaacagaagaaaaagaaaagctcttcctttttgaaagtctgttttttgaataaaagccaatattcttttataactagattttccttctctccattcccctgtccctctctcttcctctcttcttccagatcttcagggggctagaaatctgttgctatgggcccttcaccaacatgcccacaggtaagagcctgggagaaccccagagttccagcaccagcctttgtcttacatagtggagtattataagcaagatcccacgatgggggttcctcagattgctgaaatgttctagaggctattctatttctctaccactctccaaacaaaacagcacctaaatgttatcctatggcaaaaaaaaactataccttgtcccccttctcaagagcatgaaggtggttaatagttaggattcagtatgttatgtgttcagatggcgttgagctgctgttagtgccaacatgttagtgagaaaatatctttggataggtaaaaatcaaggaggagttctcctcttcctaaaccatcttaatttacttacatagaagaaagcacagcagctggcccaccacggacgggcccagagcaggggaagattctcggtgaacatttctttttttttttctttttttttgaggtcgagtctctgttgcccaggccagagtgcaatggcgcgatctcggctcactgcaacctccacctcccgggttcaagtgattctcctgcctcagcctcccaaatagctgagactacaggcgtgtgccaccacgcccgactaattttttgtattttttttttagtagagacggggtttcaccgtgttagccaatatggtcccgatctcctgacctcgtgatccacccgcctcagcctcccaaagtgctaggattacaggcatgagccactgtgcccagccctctccatgaacattttctaattaaacttgacacttaatacaatgttatgcttaggactgctataaagcttacctctggagttgcgcagcacaaaggccttggtgtgtgtataaatttggtttgttcttttcacagcaaaagctacccacctttgcctcctgtgcctgcttctgcccagggacttaggtcctcttacaccttagagaaaggccttagcatctggtcacaggcagatgagtgacagcaagaaaacctggctgcaatgtaattttgtttccatcctctttattagttatcaattggatttttatgaaatttccaagttccactcaaggatttctcagtgtttttttactttggtatagtggaaaccagggttgccagaaagtattattttgggggtgagttagtcaaccttcgttcagtcagacagacaggagcacctcagcaattcccagaaacgggctgatgggaaagagcaacatacatgaatgtcttgaagaacacagccaacagagcccattgggcagttctgattttccaggtacacagcatctccacagtctcttctgatttttattcccctgagtatatggattccagctcagcatgtagcctttccctgctgagtctctaaccaggataacatgtatttttttgactggatgaattatcttcccatctcttgacatttacagtaattaccaccaagtatggtattttcagtggccgtgattatcagttaccaacacagaattaggatgaagggaggaagggagggaaggaaggtgggtgttttttcacacagtgtcttagccagcaatttagcaaattaatggaaattagatctttgatttttttttctttcaagcattttatttgagagactatcaaaccttataccaagtggccttatggagactgataaccagagtacatggcatatcagtggcaaattgacttaaaatccatacccctactattttaagaccattgtcctttggagcagagagacagactctcccattgagaggtcttgctataagccttcatccggagagtgtagggtagagggcctgggttaagtatgcagattactgcagtgattttacatctaaatgtccattttagatcaactggaatggatggtacagctgtgtggtgcttctgtggtgaaggagctttcatcattcacccttggcacagtaagtattgggtgccctgtcagagagggaggacacaatattctctcctgtgagcaagactggcacctgtcagtccctatggatgcccctactgtagcctcagaagtcttctctgcccacatacctgtgccaaaagactccatctgtaagggatgggtaaggatttgagaactgcacatattaaatatactgagggaagactttttccctctaactctttttcccatatgtccctccccctcctctctgtgactgccccagcatactgtgtttcaacaaatcatcaagaaatgatgggctggaggctgggcatggtggctcatgtctgtaatcccagcactttgggaggccgaggcaggtggatcacttgtcaggagtttgagaccagcctggccaacatggtgaaaccccatctgtactaaaaaaaaaaaaacaaaaagtagccaggcctggtggagcatgcctgtaatgccagctatttgggaagttgaggtgtgagcatcgcttgaacgtgggaggcagaggttgcagtgagccaagattgcaccactgcactccagactgggtgacagagtgagactttgtctaaaaaaaaaaaaaaagagagagagagaaaagctaggtgcggtggctcacgcctgtaatcccagcactttgggaggctgaggtgggcagatcacgaggtcaagagatcgagaccatcctggccaaccaacatggcgaaaccccgtctctactaaaaatacaaaaattagctgggcgtaggggcgcacgcctgtagtcccagctacttgaggggctggggcaggagaatcgcttgaaccccggaggcggaggttgcagttagccaagatcgcgccactgcactccagcccgggcgacagagcgagactccgtctcaaaaaaaaagagagagagagaaatgatgggctgggccagtgccccacccctgtaatcacaacactgggaggccaaggtgggagaatcgcttgagcctgggagctgaagaccagcctgggcaatacagtaggacctcatgtctacaaaaaaattattaaaaattagccaaggctgggtgcggtggctcatgcctataatcccgggggtgaagttgagcccaggagtttgagaccagcctgggcaacatggcaaaaccctgtctctaccaaaaatacaaaaaaattagccaggggtggtggtacgtgtctgtagttccagctacttaggaggctgagatggaaggattgcttgagcccaggaggcagaggtggcagtgagctgagatcacaccactgcactccagcctgggtgacagagcaagaccctgtctcaaaaacaaacaaaaaaaatgatgaagtgacagttccagtagtcctactttgacactttgaatgctctttccttcctggggatccagggtgtccacccaattgtggttgtgcagccagatgcctggacagaggacaatggcttccatggtaaggtgcctgcatgtacctgtgctatatggggtccttttgcatgggtttggtttatcactcattacctggtgcttgagtagcacagttcttggcacattttaaatatttgttgaatgaatggctaaaatgtctttttgatgtttttattgttatttgttttatattgtaaaagtaatacatgaactgtttccatggggtgggagtaagatatgaatgttcatcacaaaaacataaatcaaggccgggcatggtggctcatgcctataattccagcactttgggaggtcaagatggaggtcaaggtgggagcctagaagttcgagaccagcctgggcaacataaggagacttcatctgtacaacaaatttaaaaagtagctgggtgtggtggcagatgcctgtagtcgcagctacttgggaagctgaggtgggaggatcacttgagctcaggaggttgatgcttcagtgagccacgatcacaccactgtactccagcctgggcgacagagcgagaccgtgtctcaaaaagaaaaaagaaagtataaatttacacaaaaacaataaaataatcccagtaattccaccacttggagatgatcaccataaaactccaccaggcatatgtgcgtatatatacacgtgtattttataaaatgtgatcataattacactgttttgcttttttccttaagatattacatacatttttccacatcgttaaattacagtgctgttttcctggtggctttcctttaacagattgaagttcatgttaatacagttgccagaggctgtgggctttcactgtcaccaggagtcactcctagggcctcttcagagcaaggccttatgtcctgaagcattgccttttttttttttttttgaggtggagtctcactctgtcacttagcaggctggagtgcagtggcccagtcttggctcactgcaacctccgcctcctgggtttaaatgattctcctgcctcagcctcagggcggatcacctgacatcaggagtttgagaccagcctggccaatatggcgaaaccccatctctactaaaaatactaaaaaaaattagccaggcatggtggcacgcacttgtagtcccagctacttgggagactgaggcaggagaatcgcttgaacccaggatgttgaggttgcagtgagctgagatcacaccatcacaatccagcctgagtgacagagtgagactccatctgaaaaaaaagaaaaaacaattagcctggcatggtggcaggcacctgtaatccctgctacttgggaggctgaggcaggagaattgcttgaacccgggaggtggaggttgcagtgagctgagatcgtgccattgcattccaggctgagcaacaagagcaagactccgtctcaaaaaaaaaaaaaaaaaaaaaaaaaggccaggtgcagtggctcacgcctgtaatcccagcactttgggaggccaaggtgggtggatcacctgaggtcaggagttccagagcagcctggccaacattgtgaaacccccgtctctactaaaaatacaaaaattagctgggtgtgatggcatgtgcctgtaattccagctactcaggaggcagagacaggagaattgcttgaacccaggaggcggaggttgaatgagccgagattgcgccatcacactctagcctcggcgacagagcaagactccgtctcaaaaaaaaaaaaaaaaaaattagcttctacctcattaatcctaagaactcatacaaccaggaccctggagtcgattgattagagcctagtccaggagaatgaattgacactaatctctgcttgtgttctctgtctccagcaattgggcagatgtgtgaggcacctgtggtgacccgagagtgggtgttggacagtgtagcactctaccagtgccaggagctggacacctacctgataccccagatcccccacagccactactgactgcagccagccacaggtacagagccacaggaccccaagaatgagcttacaaagtggcctttccaggccctgggagctcctctcactcttcagtccttctactgtcctggctactaaatattttatgtacatcagcctgaaaaggacttctggctatgcaagggtcccttaaagattttctgcttgaagtctcccttggaaatctgccatgagcacaaaattatggtaatttttcacctgagaagattttaaaaccatttaaacgccaccaattgagcaagatgctgattcattatttatcagccctattctttctattcaggctgttgttggcttagggctggaagcacagagtggcttggcctcaagagaatagctggtttccctaagtttacttctctaaaaccctgtgttcacaaaggcagagagtcagacccttcaatggaaggagagtgcttgggatcgattatgtgacttaaagtcagaatagtccttgggcagttctcaaatgttggagtggaacattggggaggaaattctgaggcaggtattagaaatgaaaaggaaacttgaaacctgggcatggtggctcacgcctgtaatcccagcactttgggaggccaaggtgggcagatcactggaggtcaggagttcgaaaccagcctggccaacatggtgaaaccccatctctactaaaaatacagaaattagccggtcatggtggtggacacctgtaatcccagctactcaggtggctaaggcaggagaatcacttcagcccgggaggtggaggttgcagtgagccaagatcataccacggcactccagcctgggtgacagtgagactgtggctcaaaaaaaaaaaaaaaaaaggaaaatgaaactaggaaaggtttcttaaagtctgagatatatttgctagatttctaaagaatgtgttctaaaacagcagaagattttcaagaaccggtttccaaagacagtcttctaattcctcattagtaataagtaaaatgtttattgttgtagctctggtatataatccattcctcttaaaatataagacctctggcatgaatatttcatatctataaaatgacagatcccaccaggaaggaagctgttgctttctttgaggtgatttttttcctttgctccctgttgctgaaaccatacagcttcataaataattttgcttgctgaaggaagaaaaagtgtttttcataaacccattatccaggactgtttatagctgttggaaggactaggtcttccctagcccccccagtgtgcaagggcagtgaagacttgattgtacaaaatacgttttgtaaatgttgtgctgttaacactgcaaataaacttggtagcaaacacttccaccatgaatgactgttcttgagacttaggccagccgactttctcagagccttttcactgtgcttcagtctcccactctgtaaaatgggggtaatgatagtatctacctcctaggatttattgaggcagcttaaataccttttgtatttcctgttgctgccaaaacaaattgttgcaaggtcagaagtctgaggtggctcaactgtttctttgtttcaggtttcatgaggccaaaataaaggtgttcgcagggcgtgttcccttctagaggctctgggtccttgcagttctaggactaagatccctgtttcccactggctgttggctgggcatcattctcagcttcttgaggctccccacattcctaggctcctggcctgtctgcctccatcttcaaaaccagcaatgggtggtcaagtttttctcacactgaatcttgctgactactgtatctttctaactcctgccagagacatttctctgtttctaagggctcaagtgattagattgcacccacttggtaatccaaagtgatcttcatatcttaaggcccatagccttaattatagctgcaaagtcccttcgcagcagtacctagattactgttggaatgaataaccagaagacagcaatcaagggaggacatctttagaattctgcctaccacttgtatttaacatgcttaatccacagatgacactctctaccattatttcctggtcctcacactgctcagagattggaatcctttttaagcaaagagaatgaagtcatcacatagttcagtcctgctgtatttgctggaaacagtgaaggaagatagagaaaatggagctaactgccaatattaccattttataatcagtcctcaatcatagccctatgaagtgggtatttgttacctcattggaaaaatgggagttgaatctcaagttccttgtttgtaagattttactcagatttgcacagctaaaaatgactacatggagacccaaagccacctttctgttcccatcatcagctttccatctgcctctgtcactgaccccgggacagaaggttcaagccttaagggaatttggagagagaactagattttgaggggaactcacactcacttcccttttgggccacagtaggagacagtaaaagcagccccatgtcaggcaaagggtcttacaggagtggatcatggctgctgtttccacttctctctggcttcccagcttatgactgtgtatcttagttgtcaaagccttccagttcatcctcacctacagcttgacttcccaagggcccatgccagctccctgtctacctgccagtgagttgatgagtctcggtgttagtagtaaaggcaggcgggaagcaagcagaagtgctactgggccttgagggtaagccaggcctcagccttctgaccccatcactaatgggttaataggaaaagcagtatccatctagtacagcctgccttttcaggaatagtgagtaaaagcaaagatgactaaaatacattaaagttttctgtaattgtctctaaggtctcccaacaaacatataccccatctgtttcaagctctgcataacctttcccagaagtcaagttcaggccctggcctcatggtgcctggcccaggttaagagtgctacctgatgatggagttaatacacgttgctttgacctctgactttaagatgtcctcccacttttccaccccgcaatctctagccctctctgggcacagcagcaattgggaactagttcctgtactgcctttatctcattttacaaaacaaacttctacaaagaagctggaaaggaaggaggagaaaggattatcatgcaggcacagggagggggcctagagaagagctctggcagattatgtccctcttaaaaaatgcaaccagaatcatcaacaaagtatcacctcaaaaatatgcaggagaaaaagaaaggaatcaatgttggggtggttggagcagaaggagccaaactgcccagaaggtgtcctctgaaggctgcgaggagcagactaggtcagccccagaggcagatggcacacacagaatggcaggattaccggtagctgcagatttattgacagaagccctagagactgggcctgctgcccagggaatgtgggggctcacttatcaaagactactggaaaatggctgagccggcaaccccttccactacagtgatgcctggttttcttgcacagcctgtaactctgcctgtaacaaggagaaaattaaagcaacgaatctggccaaatagaaaattaaggaaaactagaaacagctcctatggagagcagggattggggaggtgtagaggggctgatcctgaatgtctggaggatcaggaaaatgtaagcaattgtttaagggactggtaggaatcaagatctggagagagatcctcccgactctggtggctggggaatatgaactgtggagacatggtttcaaggactcaaaatgatatgacagcttaacatttacagttcagtgcagaggctctcaaagcatgatcccctgataggagtgtgagggggcaacaccatcacctaggaatttgttagatatgcaaattcccagacccactgaatcccagacaggtggggccagcaacctgtgaatctacaacaggctcaagtttgagaacaaatgacttagtgtaaggggctgctaattgatataaaatgttacctgtggtctattattttgtctgtagtgaatattgggcttgttaaggataaataaggtttgtgggctggtaagtggttcttctctacaaggttgcaacagctggcttcagttaacttcaaaaaggccctttaagcaaagacagtagtccccccactcatccatggttttgatttcagttacttatggtcaaccatggtccaaaaatattaaaaggaaaattccggaaaccagtcactcgttttaaattgtacaccattctaagtattgtttgacttgttctattttattattagttattgttgttaatctcttactgtgcccaatttataaattaaattttatcataggtatgtatgtatagggaaaaacataatatatatagggtttggtactatccgagggttcaggcatctacttgtggtcttggaacatatgccccgcagataaggggggactgctgtacaatgcaaaggacaaagattaaattatattagcaatctaggagcagaagggcaagactgcttttttaaaaaacagctaaaggtttaggaggttttattaatatttaaattgtattgaaaccacagctgcagcctttgactccagcatagagatatgcaaatatggctttcaaaagaaaggcaatttcagacagccctcaaagtaacaggaacaaataaaacaaatgattttgtaatttatctttattgactgatgttgcacaaggcacaggccataccctgtgagagtcagcaacagccgagctctctgaggagagaagagaaagccaggctggagggagaggcaggccgacccatagacaggtgacaggaaagacacagagcaggcagatgggagaagaagacaactaaattaaaagggaaggaaaataaaaacccagccctgggtcctgtagaccatctgatcttgctggctctcagcagcaacaacaataatcattaatgactatcatttgccacactactactaagtgccatgcactattcctcacatacaaatgaggaaaatgaagctttgagaggtcaagcaacttacccaaggtcacacaacaaaaggaaggggcagagcccagattcaaagatttgtgtgaggctgaagccctgtgctctttccagtgcattatgctgggaaccagtcctgggaggcagtgaataacaataaggttaatgggccgggcgcagtggctcatgcctgtaatcccagcactttgggaggcggaggcgggcaaatcacgaggtcaggagatcgagaccatcctggctaacatggtgaaaccctgtctctactaaaaatacaaaaaattagccgggcgtggtgtcgggcacctgtagtcccagctactcaggaggctgaggcaggagaatggcatgaacctgggaggcagagcttgcggtgagccacgatcgcgccactgcactccaacctgggtgacacagtgagactccgtctcaaaagaaaaaacaaaacaaaacaataaggttaatgattgaggggacactttgtgcccagttctgtggtattctgtatgggcatgcgtgtgtctgtgtgtgtgtatatgtatgtaactgtggaaaagagggtgaaaacctccatttctgaccttcaaattggttactatccaatgagtaaggcaagaaaagaaagccaaagaaaacttgcagaattctggtgtaaaagttcttttggggccgtgtggtggggccagctctgcctgttgtggaagacttctggtggaggcatctcagctggccttggccttgagtaaaatttagccagatgaaaaggaaagctggagattacacaggcccaggtgagagcctccagctgctagaattggaggaaggagcacctgattcagagagatgagaaaaggcaagagaatcctgaaaggatacatatctctgaccctttgtccccatccaatctccccagaccttccatcccaagcccaaacacaaccttacctgctgctccttttcaggcaccctggccaccaaatataggaacccataaattttgctcatactctatgttctactaggcaagtcctgatctgtcatctctacaggccccaatccttcccgctcacccctacagagccttctccaggttttctaggccagaatctctccccacttagaatactccagaagttttgctttatttgtgagactttattcaattgaagttacttgtgtgcatatgttatcctctctatttgactagaaggtccttataatcccttatgaccataattattttatctttgatataacccagctctgtaactagcagatactttgttaggcatccagtgggtttttcctaaatgaatgaagtaaaggatgaatgaatggactcagtgcattgaagggcttatccaactattggttccactctcaagacctttggaaaactagccatgttctggaatgctaattcccttcaatgcctttcgcccatttttctatgaccctgatttactccaaaaacaatataagggatctaagtgtccaagaatgactccttctaaacccacacctaaggattttctctctttttgtgtgtgtgtgtgtgagacagagtttcactcttattgcccaggctggagtgcaatggtgcgatctcagctcactgcaacctccgcctccagggttcaagtgattctccctgtctcaccctcccgagtagctgagattacaggcgcctgccatcacacccagctaatttttgtatttttagtagagacagggttcaccacgttggccaggctggtctcgaactcctgtcctcaggtgatccacccaccttggcctcccaaagtgctgggattacaagcatgagccaccacacccggcctctttgattctcttttgcctatcatgaagtctacccctttgtaattaattagaccaatgtccacccagacagaataacattttcccctatccatcagcgaggtcttctccgtgatggacattcaaggcagacagagagactgctgctgcaataactggggaaataattatggtgttcatgatgatttctttgcaggttcaaagcactagcccagccattatctctcccacttcactaggataaaattgctaaccccactttataggtgctaaaacaggtccagggccttgtcaaaggtcactcagtgagctggtggcagacctggaaataactagcctaggagtctcgatattcattaggccacagatggaaatgccctcattatgctgtctgggctatgtctgagagagagtcaactaactggactccagttaaatggagatatgcactggaagataagtttgtgactacagagtgtttttctctgcaatgctgcagcagttggcactggttaattccagagggtgtgtgtgtgtgtttgtgtgtgtgtgtgtgtgtgtgtgtgtgtgtttaaagcattatcacgcgtcctagatgagggaagagagggtgaatccaaggtaacacagacacacaggtaagcagatgtttgccatcttctcttgaaagtcatataaaaccaaatgacagtgtatattagcaggagaaactcaggaggctcttcccagctgttaggctatacgactctggaataagctagtacaaattaggtagaaagtctaggattgttcctagagcctggtggcgggaggtctttcctggaggcaaaggactgtggggctgtctcagggccttctgcagctgctaaagtgagaagcctgccgacgggatcatccccaagcccacagaagctctgaaagctatggaaaccaagatctgtacaggagccacttctggtttctaatgcctgagagattaaaatggaaaaaaaaattcccatggaaattcaagaatgcaagaatgttctggggccaggcacggtggctcatgcctgtaatcccagcacttttggaaggccgatcacctaagatcagaagttcaagaccagcctggtcaacatggtgaaaccccgtctctattaaaaatagaaaattagctgggcgtggtggtgtgcacctgtaatcccagctactcaggaggctgaggccagagaatcacttgaaccctggagccagaggttgcagcgagctgagatcatgccattgcactccagcccaggcaacaagagcaaaactccatctcaaaaaaaaaaaaaaaagttctacaacgtggccacaggtccgttctggctaaggcagtgatgtccccctcccaccaaagcccaaaccttctaacatcatcctaaagtgtgggaatcacctcttcacctcaggccagctctgggcttttctcagcctattcatcagcctccattagtcctcagctctgctgaggcctcagcagcttcccagtcccactgaaggctgtggggcatagaatgggcagagggcaggccgggcgtggtggctcaagcctgtaatcccagcactttgggaggccgaggcgggcagatcacgaggtcaggagatcgagaccatcctggctaacacggtgaaccccatctctactaaaaatacaaaaaattagccaggcgtggtggcaggtgcctgtagtcccagctacttggtaggctgaggcaggagaatggcatgaacccgggaggcggagcttgcagtgagccaagatcctgccactgcactccagcctgggcgacagagcaaaactccgtctcaaaaaaaaaaaaaaaaagaaagaatgggcagagggcataaaacctgagtccagaggtggtggttgcacaacattgtgaatgcactaaatgcccctgaattgtacattttaaaatggctaattgtatgttatgtgaatttcaatcgatttttaaaaaaaataaaactgagccacctttggggtggggagaggagctgggccaggctctgaggatttgagggttgaaactccttgcagggagtgaaatgaacgacaatggggaggccagtctggccctcccaactcctcctccaggaccagatgggaactggggctagggagaaaggcccaactggggcggcgccgggctctgggcagaagagaagcactcagtgaatgtgaggaggctgcagccgtcggctcatttgcatcataagtgattggttttccctgctcgtccctcatcaggacacaatggacagttgtttgctggcgcagcagatccatttaccaagggagagaggagacagagcacaagtgaccgatgggtaatagtgttgaagggtgggcagccgcctcccctcccctgtgctcccaggccactgggactcttgttctcacacaatgagaagggaccttagagagcaaatcaccgcttcactttatagaagaagagactgaggtgctgagaggaggtgagccttgctgtggtcaaacagcaagaacatagcaaaactaagcattttaaactctaacctctggatcctttttctttgagacaaggtctcgctctgtcacccaggctggagtagtacagtggcacaatctcagctcactgcaacctctacctcccaggctcaagtgatccccccacctcaactttctgtgggccacgacacctggctaattttttgtagagacaaggtctcactgtgttgcccacatttttctcgaactcctgggctcaagtgatcctccagccttggcctcccaaagtgctaggattacaggtgtgagccacagcactgggcctgtttggtttttgttttgttttgtttttttgagatagggttccactctgtcatccaggctagagtgcagtggtatgatcactgctcactacagcctcacactcctggttcaagtgatcctcccacctcagcctcctgagtagctaggactataagtatgtgccaccacgcttagctaatttttatttcttttattttttctagaaacagtgtttccctatgttgcccaggctggtctcacctgggttcaagtgatcctcccacctcagcctcctgaatagctgggattacaagtgtgagccactgcaccaggcctggattctaaactgtcatttgagggttcacttcgtttccccataataccttctctgtgcccttattcccatctctgtggtctcctgttcccggggccttcgtttccatcattctgtctcctgggtctatttctttttctctgtttctgttcctctctgtatcttttcctcttggtttccaggcagctaggataattactagacttttaattaacccctgccctaacaaaggtgggtctggcatgaggcagcaatttagcaagtgtcttggtttgttttggggataggtggggagagaaaaatatgtgttggggcctattataaaccaggcactaagacagacacataatgcactttatctcatttcatcctttcaatcttgcaaggtaggtgttcttagagacaaaaagggtgaggctcagagaggttaagtaacttgtgcaagggcacccagctagcaaattgtagttacctgactccaaaacctctgttcttccatctcacaccctggcacagggtctaactcagggtaaggggctcattgatttcaggcgcaagggaggcacaaagtcactgaaggagaccactgttttgttgctgtcctctaggcagcgactgcgtccccccagagccccctccttctctgagccccttctgcagcgtggcgaaatctcacaaatgcaagcttttgcccccagggaggtggggaggcagtgatcaagaaagaaacctgacaaacccagaccaaccatgggggtctccctcctgttaacacccctccctaacagccctcctggtggttccctgtctgcccctcccctttatgggtcaagcctgctggcgtctgtttcattgtgctgtgggggaaggggagagtcaggggtgagtgggtgtctgtgtgcatgaacataaggcctccgggttcattctgacactgaatgaaaaactcaccaattattcgtccagtctcattaatatgcagacagacatctgttatttaggagtcaacagcagaggcattttcttgtcgggaggggcactagtgtacagggctctcttgtctctccgctgctagcgggtagctactcaggaatcatcccacacctcccgacctggagcctcccctctctctgaccctcactcacagctttgaggacagcaagtaagggattgaccagacagagatggagggagatctgggaacctggctggaaggaaggaagcaggagaggagctgccttgtgtagaacaaactgagaacaaaacgctaaaccctttcctggggaagagaatgtggagttgggggagagagctgtgccaagagtgcctgccccactgggaatctcagggacatgacccctccccccacaccttcctcagcctgcaggacaagtctgagtgcatctgaagcagggagagggtcactatggcaacatgaagtcctcacccagagactgcagaaaacgtaataagaggagttcagaaaaatggagaccaagggacctcaatctttttttttttttttcaatttatttatttttttttattgatcattcttgggtgtttctcgcagagggggatttggcagggagggacctcaatctttggaggagtcactaaagctctcttcaggccccaagataggggtgggaacaagacataaccacctcctgctttctgtcttctgtcttcctccagcctttaagtcccagcacaaaatacccctccaagaagcctttcccaactccctcaggcccagcttagaagcacttaagccttggtgtcttggttgtaaagaataaaagttgacatcagctgagcaacacaatgaggtagatgtggtgatcagcccccttttctaggtgcaaaaactgaggttcagagaggtgctgggcctcaccaaagattccccagggaagaagcagcagagctcaacccaggccctgggacttctgcctctgaacctgaagctcttcccacgactaccccctgggagggccagagtcacaaggggaggacccttgtcagctgaagtgtttcaggagtttgattgagtcctctcttcccatccaccctgtccttccccctcctccctcctaggcaggcggattgcctaggttaagaaacactagtctgggcgaggtggctcacgcctgtaatcccagcactttgggaggccaaggcaggtggatcactaggtcaggaaattgagaccatcctggctaacacggtgaaacctcgtctctactaaaaaatacaaaaaattaggccgggcgcggtggcttatgcctgtaatcccagcactttgggaggccaagacaggcggatcacgaggtcaggagatcaagaccatcctgactaacacggtgaaaccccgtctctactaaaaatacaaaaaatgagccggacgtggtggcaggtgcctgtagtcccagctactcgggaggctgaggcaggagaatggcgtgaacccaggaggcagagcttgcagtgagccgagattgcgccactgcactccagcctgggcgacagagcgagactccgtctcaaaaaaaaaaaaaaaaaaattagccaggcgtggtggcgggtgcctgtggtcccagttactggggcggctgaggcaggagaatggcgtgaacctgtgaggtggagcttgcagtgagccaagattgggccactgcactccagcctgggcaagaaagcgagactctcaaaaaaaaaaccactagtctgggcgcggtggctcctgcctgtaatcccaacactttgggaggccaaggtgggtggatcacctgaggtcaggagttcgagaccagcctggccaacatggtgaaaccccatctctactaaaaatacaaaaattaggtcaggcatggtggctcacgcctgtaatcccagcactttgggagactgaagcaggcggatcatgaggtcaagagatggagaccatcctggccaacatggtgaaaccctgtctctactaaaaatacaaaaatggctgggcacggtggctcatgcctgtaatcccagcactttgggaggccgaggtgggtggatcacgttaggtcgggagttcaagactagcctgaccaacatggagaaaccccatctctactaaaaatacaaaattagctgggcatggtggcacatggctgtaatcccagctacttcaggaagctgaggcaggagaatcacttgaacccaggaggtgaggttgccgtgagccgagatcgcgccagtgcactccagcctgggcaataagagtgaaactccgtctcaaaaaaaaaaaaaacactaaaattagctgtgcatggtggcgcgcgcctgtagtcccagctactcaggagactgaggcaggagaatcgcttgaacccaggaggcagaggttgcagtgagccgagatggtgccactgcactccagcctgaatgacagagtgaaactccgtctcaaaaaaaaaaaaaaaaaaaaaaaaaaaacacagaaactctggcagccatcacagtgtgattatttgtttatttcattaaatgtttaacgaggctacattgtttcccaaaccaatgtctaatttgtgaaggaaacagcgcagagaaggaagctgggtgactcctgcatctggggtggggaagggagtaaggtcccctccctccatcctacagaggcctttgaggatcagcaacagtcccattccctcctcccacccactgagctcctcagcccagagccctcctccccagaaataaaacgtctggcaacccagacctgcagaaagggaccaaaaatccattcctggtggtattgaaaatgtattaaactttggggggtcctccagctgattgatttttctaattatgtttgctttagatggatatttaaatgcatttgcattccctgagctcacatggcaggatatggaggttggaggaaagagggggcacaaacactccacactctgcactttggtggttgcaggcttgaacctgctatacactgagaagtccaaagtggaaaagagaagccactcagctaaaaatcgcaagtcgatttttatggcaggtccttgtggggaaagggtcagtcctcagagacagatggagatccacctagctgggcctggagcccctgccctctcctgtacccttagccgaggactcagggtctttgagtcagtccctaaccaggtctcagtttgagggggtggttatccaagcacacttagataatttcaaatgccattgaagttatcctagaatctttgagactggctgagatgaactagtcccataggagaggttgggatagggatatctgatgatccagggagtggtgggtagggattcctttcctctcaagactggaacctggcataagggaaaggagaagctattttttattttttattttttaattttttttagagacagggtctcactctgacactcaggctggaagacaatggcatgatcatagctcactgcagtctctaactcctggcctcaagcgatcctcccagcttggcctcccaaaggaggaatcttggctgggattataggtgtgagccactgccgagaagctattattttaaatgacacacctcagagccaaatctcccagctccaacaccacatccagataaccatctatccaaaaaacaactctgatcacttcactctctgcctgaaattcctggtggcttcatcctctgaggatgatttcattcatcctcagaatgaaattctgattcctctgtggaccctgcagtagcctcagtgtaccttcctagccttgtcttctattctccctgccatgggagccccaacagtgctatgctcattctcatctccacgtgtttacacatgctgtaccctctgcccagagtgcctttcctaccccttccctgcccggaaaactcctcttcaaccctcaggacctggctcacaggactggcttctcaggctgcaaggagctcccatagcatcccatacatgtacaaatatccctcagccatggcaccctcacacctgaggtacctctcttccacactgggctggcctccaaaagcttagagactggtccttgcaatctcccaagccagtgtatgccacacagttggtgttcagtacatacttgctgaatgaatgaatgagggaggaatgggctataaatttgggtgggatcccagcagatagttgggtaaggtcagtgttctcttccagtgtgtctgggagaactggctagggctgggggagggaagggccagggatggttcctgggggagaatgtcaccgaaaagaggccagtgggaccagagccaggaagggaatacaggacaatctgaaaccagactcccgagaaaacagaccagtactgtctttcctgacaacaggcgctcagccgtcctctccaccgtctttcctttaagggacagggtaggggtgactctaacagctgatgctcccctgaaagccatcatgaaactcagcatgggaggagagaaaggtccctggcctgagcctctaaggagaccccagaatcaaactactgacctcttaggaaacttcacgctgtacaggggtagcttctgtgatgtggaggcttttgatgccttcttttttttttttttttttttttttggagacagagtcttgctctgtcatccaggctagaatgcagtggcgcaatctcggctcactgcaagctccgcctcccaggttcacccgggttcacaccattctcctgcctcagcctcccgagcagctgggactacaggcactgccaccgcgcctggctaattttttgtatttttagtagagatggggtttcaccgtgttagccaggatggtctcgatctcctgaacttgtgatccgcccacctcggcctcccaaagtgctgggattacaggcgtgagccagcgcgcccggcctgatgcctccttatccccacaacccccagggtaccagcaggctccaagccaggggtacagatggtgagcaggacccctcccacactagcagcaggcctggctgggctgagaaatgctgactaattatatgtcggtctgctctaaaaccccctaatggcctgagaattgcccacttcattaactaggatgaacagtcccaggatgtctccttctcccaactctgactcctaaaaggacacttctgatccaacctatggctttgtcctctgctctatctgtggacatggacaggaaagttccccagctgaggtctaactttccctcttactgctaaagattggtagattgatttttttaaaaagcaacaaaactaaagccacagccgttttccatggaggtgggctttattaggtgactgttgaggcaagggaggttctagggctggtggactgatggggggcaagggcttctccttgcttttgaatttagtgcatgttgcctagaggttagatgtgtgagaatagctgcagaagtgagaggagaggaaaagagaaggtcatagaatggacattttccttgggccagaaccaggatatggggactgggggtggagagggagggtactcttcacataggagactccaccaaggtcaccatttgataccagcttccctaacgcccacctgccccatcccagttcatgccccagatgccagccctgttagctccctcaacatccactggagaagaggagggaggaggagatgagaaacgatgatacccttctgccctccagctcccctgcccagaattgctcgctctgcctgccctaacttcccagccaggatcaggaggtcaggaagcctgggcgcaggcaggggaacaattgtgtccctcaccacccctcttcacactctgccctctcctagcccctcacatgaggttgcagcttttggctcgatccttgtgtatctcgccctcattcccccggtctggccgtcctgacagctgagcggatcgctgcattccccggcgtgagtcagttcggcgcagctgcctatggccacggccaagggaggccactgtagccacatggaagacatccctgacgctgcgctcagaggaccgggaggagcactcaacataggacacagcccccacctgcttggccagcacagtgccctggaaaaggaaggagtgcatgggagaaagttataggtcttagcctgcagcttagaaaggggcatggaggctgtgggctggggttgaatgtcaaggctgggggcagtcaagggatcaggtcagaggtcacagaccagaacaaaggatgagccaggtaaggtgttttcaaatcagagactgaaggggcagaggtgacaggtctaggctgggatgaggtcagacgtcaagggtcccacctgctcatgtgtaacagggataagcctctgcttggacagctccctcagtgtggccaggtcagtccgcatgtccagtttacagccaaccagcacaaccttggcattggggcagaactcttgagtctctccttgccactatgtaggagaagaaaagagaattgtggaggggtggagggaggcacagcgtgagcctttgtgccatgccagcagtgtgccctctcttcctcaagcacgcagaaaccatgtatccctcaggactctcccacatgaggaaggaggtgagaatgctaggcttggtttgagagcaggatggggtgagagagaagcagcggggaggagagggctggcgtgggcctgtggactcttctccctcagtggctatgaagggtctgccagcctggaaacttcccattcccactcgcctttcccatactctctcctgggaacaaatttatcccaccctcccctcccccacctgggaactggggctgccctagctgacttctgtccattcacccctggcttttgtcatggaaactggggcctggagaggaggccacagggctttcctgagctccaggatcaggcttcccatcccatcccctccatctgggactcccactgccaaggagttggaagagcagagaaggaatcctgtgagtgcttctcccttcactcccccacctcccctagctgctgtatccagctctgaggactttcaggaaaggggtggctgggagggatgggggctggaggcaggggtggcagggatgagagcttcactcgctaaccagctgatggccataccccagccatcactccctcctcctggcccatgttatgtcaggaccatggtggtctggtccccctcagtctagctgccctatttccccaggctcccaccttcttgagaacactgtccagtgtttctggtcggctaatgtcgaagcagatgagcacagcatcagaatcaggataggccagaggccggacattatcatagtaagaggaacctgaaggaagacagggcatgaggggcctgagtggatgggaggcctggaagggaatgggagaccttacagatcctggtcaagggatgctgggagcagagaatggaaaagagcaaccattaatacccatcattaatacccatcatggagtctgggtttcccaagtgggggagcgggcagaagggaggtcacatggtgggaaacggctctctgcttccctagtggtttaaaaagtaataatttttattcttgactgaggtttggacccctttgagaagctcataaaatctatagacattctcataaaatgttgcatgtgctttctgggctttggcagtctaaagccctgaagggaactcttgtaaaaataaaaaccctccttatgttgggaggaggaaaagagcagtggcagggagagcactctcccattctcctgggacttgacctcagatttatctagttcaatggagagaaacagcctcctgaccacccctcactcaagacattctaaatgtcttttctgcttttttattttttgagatggagtctcgctctatcgctcaggctggagtgcagcggcatgatctcggctcactgcagcctccgcctcccaggttccagcgattctcttgcctcagcctcctggtagctgagattacaggcacgtgccacacgcccgattaatttttgtatttttagtagagacggagtttcaaccatgttggccaggctggtctcaaactcctgacctcaggtgatccccccaccccagcctcccaaagtgctaggattacaggcgtgagccaccgtgcctggcctctaaatgtcttttctaaacccagtcttatctctgaaggaacatgttccaaattaaaagccattccttcccaactttcccaggtaggcaggacccagctgaggggctcagatcctaggctttctccttcaggacatggtttctgtcaggctctgcaagttctacctcagtttccctggattttagcagaatattgatttttcccttcctgttggaattggatggatgggctgggcttacctggaacctaagggtctaaccaagggaggggacagagtgggccgccttggaagtcagggtgacccccagggacttggctacctgaagtgtcccacatgttgagctcaatgcggcgcttgtcgatctcaaagctcgcagtgtagttctcaaacacggtggggacataactctgcagacacggatggatccagatgagatcatctctccaagtcctcaccccagataaatgccctcctcactcccacaccccgtccagcccagcccctggacacaagttggtctgggattgggcaaaggggagatcccgggagctcctgcccccccccccccccccccggagaatctctgctaagctccaagacctcctcctgttcccttctggtcccttcagccccctagttcttcccctctccattgcccaggacctccgacattcccctcgccctccctcccggatgctctggttctcccaaaccccatctatctcaccctgctccctaattcctcccaccccaatcctctgcagtccttcctgagccctcaaggcctccccgcgtcctccgaccccctgtctcttgtccctggttacccgagtacccattcccatccgtcgccagggcccctgtcacccaccccccagcagccttagcgtccccctcccaagacgcaggtccctcaccccgggataggcgtccttggcgaacacctgcagcagcgccgtcttgccgcactctgcgtctcccaccaccacgatcttgcagcggccgctctgcccctccatggtcccggctacgagccggtcccccacgccacccctctcccggtcccctccttcgcctctcccgcccctgcaactgcagccgctcgggccgccaacaccggcatctcccgggcccgcgccgagcccccgccccgggtccgcggccccccctccgccccgcccccagccagcgccgcgccccccggccctcctcccacccccgcagccggggtcggggccagaagatctggcggagccctgggaacagaggcctcagagccggggtccagcccgccggtgtggtctgaggggcccctgccggtttgggacaggccgaactgggcttatttgactttctcggatataagggcaggtcagagttcaagcgaagttcttaggggtagaatatgagcggcacaagcgcgaagctcgggcctgctgtgtacccacgcgtgcacgcaggtgtaccagtgcggacaagagctggggcagccatccacttcctgaacacggcgggagagagatgctaaggggaaggagggagcctctttggttttctctcccgcgtccgcctatgtcctggcagggggtcttggggaaatgggagggtgaaccccagcacacccacccggacggtggtgacatcatagctttccgtccccatggcaacgggcagccgggtctccggttacattgacttaaccgccggcctagactagcagagaagcgtggactgagttcctccagccaagcactgggtggaaagttttgggggagctgcgtcctctggtggatgcttggggacaaggagataaggaagagaaagaaccaaccgccagagttgctctgctggagccagagctaaacccaaaagtcaggcttgattaagagtctgacaataggccgggcgcggtggctcacgcctgtaataccagcactttgggaggccgaggcgggcggatcaagaggtcaggagatcgagactatcatcctggctaacacggtgaaacccgcacggtgggcgcctgtaatcccagctactcaggaggctgaggcaggagaatggcgtgaacccgggaggcggagcttgcagtgagccgagattgcctcactgcactccagcttgtgcaatagagtttcgaaaaaaaaaaagtgcttttttatatcgaggcaattcgagtcaataatatatgctgcaaataattctgtaaagataactagaagctgggcgcggtggctcacgcctgtaaactcagcactttgggaggccaaggcttgcttgcgtgcaggagtttgaggccatcctgggcaacattagcgagaccctctctctagaaaaaaaaatcaaaacttagctaggtttggccactctaggcacgctgcctatggggtagccctgctctgcaaagagcagtaaaacataaagttagccgggcgtggtgacacatgcctgtggtcccagctattcaggaggctgaggtgggaggattgcttgaagccgggagtttgaggctgtagggagctgtgatcgccccacctcgctcagcctgggtgacagagtgagaccctgtatcaaaaaaataaaaatataaatataactagagcacgcagcatcatcactatgttacagaagggaaaatgaggaacagaacgttaacaccaaagtcagaaagttttaaaggcttggtctccatgcttctactttgccactgcaagaccacagtgaattaagtctcatccctgcctgggttagatgtcagagcctgagacacaatgtagttggactccagtccacaggtggctgactccaaatctgatatgagttaactccaaatctgatgtaagttcaagttttgggactgttccttaactttttttttttttttttgagacggagtctcgctctgtagcccaggctggagtgcagtggcgcgatctcgactcactgcaagctctgcctcctgggttcatgccattctcctgcctcagcctcccaggtagctgggactacaggcgcctgccaccacgcctggctaattttttgtattttttagtagagacggggtttcaccgtgttagccaggtgaatctcctgacctcgtaatctgcccgcctcggcctcccaaagtgctgggattacaggcgtgagacaccgcgcccggcctttttttttttcgagatggagtctccctctgtagcccaggctggagtgcagcggcatgatcttggctaactgcaacctccgcctcctgggttcaagcaattctccagcctccgcctccctagtagctgggactataggcacctgccaccatgcctggctaatttttgtagttttagtagagctggggtttcaccatactggtcaggctggtctcgaattcctgacctcaggtgatccacccacccgcctcggcctcccaaagtgttgggattacaggcgtgagcacggcgcccggccctttttttttttttttttaacagggtctcactctgttgcccagactggagtgtagtggcgcgatctcggctcacctccgcctcccaggctcaagcgattcctctgcctcagcctcccaagtagctgagattacaggcgcgcgccactaccgcccggctaacttttttatttttagtaaagacggggtttcaccatgttggccaggctggtcttgaactcctgacctcaaatgatccaccagcctcggcctcccaaagtgctgggattacaggcgtgagccaccgcgccaggcctatcccttaaaatagtttttaatttgaataaggtttactatgaataaataaatcacagtcggcttgatcccaagagcacagacgttcctggtgccccttttcgtgctctcccagcttgcgccactatggccctggccctttaaggctgagcgcgaggccccgcctcgcccggcgccccgcccctcccgctggatcccgcagccgcggctcttcccgacgcgttccgacttccccagctgtgcactctccatccagctgtgcgctctcgtcgggagtcccagccatgtccgacgagagagaggtagccgaggcagcgaccggggaagacgcctcttcgccgcctccgaaaaccgaggcagcgagcgacccccagcatcccgcggcctccgaaggggccgccgccgccgccgcctcgccgccactgctgcgctgcctagtgctcaccggctttggaggctacgacaaggtgaagctgcagagccggccggcagcggccccggcccctgggcccggccagctgacgctgcgtctgcgggcctgcgggctcaacttcgcagacctcatggctaggcaggggctgtacgaccgtctcccgcctctgcctgtcactccgggcatggagggcgcgggtgttgtgatcgcagtgggcgagggagtcagcgaccgcaaggtgagcgggttgcgtagggcagggcagggctgcgcaggccactgggcagtggggcacgagtgggcgagcgccgggggtgtggcagggcgggagaaactggcgcggacctgggtgcacgagcgtggaaagcgtagccaaggaacttgtgtttgggggctcctggagagcggcatttatgtggggaggggagacgaaattatcgccccttccccaaccattttaagttgtggccgccgcccagaagctgtgctggtgggggggaaaacaataaggtgcccatgcgcatgcgcacaaccacactaccgtccccacccaccccccccccccccattaaaaccacacctgtacccctacccaccaaacactctctgggtaattgtggtctgtgactatgagtgacggttagtgccccctttccccgagggagcttgaggggctatgtcgtcggggttgggcgggggcacagcggccgtgccagagtcctggtcacatgcagccccgtggtctgtgggggtgtgaggcggcccctcccaaagcaaggccaaagagacgagacacgcccatcacggaggagagagagcctttgctaccccaccgccaccagccttacaccgccgatctgattttggggtgggggaggcgggattgggtcatccgatctttgtcttgggctctgtgtctcccgtgactgcagtatctcctcctcctgtgactcagccctcagccttcgggccacgacccggggctgcccttgggaatgcctggggcggggagtggaaggggggacccacctctgccttcctcctgcagaggacccccacttcagaaaccccagtgccaggggtttggactggaacggagaggtgcggcgccttgaactggttggccaagtctgcaggcctgtttctccttctcatttatcattaatcttggccacaaccctggacaccagagagctcaaaatgatcagctttttgagagacctgggatgaggcctcagcacgccatttgtttagaggtttcttttttttttctttttctttttttttttttttttttttagacggagtttcgctcttgttgcccaggctggagtgcaatggcgcgatctcggctcaccgcaacctctgcctcccgggttcaagcgattctcctgcctcagcctctcgagtagctgggattacaggcatgcgccaccatgcctggctaattttcgtattttttagtagagacaaggtttcaccattttgggcaggctggtctcgaactcccgacctcaggtgatctgcccacctcggcctccctaagtgctggggttacagacataagccactgcgcttggccaggagtttcctttttaaatcagacccctcaatgagaggccccacagatgcagcctcttgcagacctgccagcccaattctggagccaggtttgttggattcatcctgtatgcaaacagcttctccttaaggctttcctctgaattcagctctggccccaccctcaaactgacttctaaatgatcccactcttgagcaggcgtctaagaggaatattttcgggaggtagttgtagttcatgttactgctgaaggccacccacctcacctcccctccatacactttccgcctggtaaatacaggatatcctgtccagggcaagaatctgatgtaagagcctggattctgcggggagggcccttccctctctctccctcctcctccctcctggtgtctgggttggggaggggtcatggccctgatttggatggcctgagggttagcatgagccagggtaagtgagacttgttctgggtcaaatctgggactggccatgaccctaaatgaccaatgcactcctcgcagctctcctgggttgttctgtatctgctagtcctgagtccctgggtggagggcttccgttcttgttctccagacctcatctcaggccagaacttggaaggaaagaccccagcatgccctcagttctcgtattcagtggagtgtgggggcttgaggacatgaaaaagggcgtaagtggcagtcccatcccccttccccatggaccctaactcttgttaatatacagaattcccatcattcctggcagggatcaagacagacccagattgtcccagaacagcacccacacctccctcttcatgctcttcagagagcgcagagaagtcttttctcctgacgctccctccttttccctgcccttcccttgaccccacttgctaagctggagagaaaggttctgttatctttgtcccctttccctcctgcacagaggctctcgtgggggtgggggggaagccttttactgctgcgtaggcctctgtagcccttcttgtctgttgcccctcctgcaccatctctgagtgaagatgttttctgggctcccagtgctggctcaaacacacttctcccgaggtgaccacaccctgctgtaagcgctcagagaactttgtctgcactttggtatggccctgaccacacagtgccgtcttcttttggttgtgtgacttccttgctgctattatattattattattattattgttagctaacattattaagtgcttattatgtgccagacattgtgctaaaattttttttttccatttggaaaaactgccctaattgacagataagaaaactggagctggaaaagtggagctcaaaaagattaagtaatttttatgcatccgaagtcacacagtcagtaaacagttgagaccgcttttgtaaccacagcagtttgatcttttccacaatacttcatgctgccctaactgtaagcttcttgcattcagggatcttacacaatagtgacatgtaagatctgtaagaagatgataaggatagtatctgcctcaaagaactgatgtaagggttaattaagcattatatataaagcacttgaaatcgggctcggccctcagtcagcactcagtaaaggtgagttgttattgttgttgatgatgatgttattattattattaccatgactattgctgcttctcctgctacttcatttggaagaaggtggccttgtacctagggggaaatcagtaaatagcctgtgggtgaatgaatgagtgactgaatgatactcttctgttcttcaaggcaggagaccgggtgatggtgttgaaccggtcagggatgtggcaggaagaggtgactgtgccctcggtccagaccttcctgattcctgaggccatgacctttgaggaagctgctgccttgctcgtcaattacattacagcctacatggtcctctttgacttcggcaacctacagcctggccacagcgtcttggtacacatggctgcaggtgacaggtcccctcactttatcaccccttaccccacccagatttccttccaggccccttccctgcagcctgtctgggttgttgtcatggcaacaccaggctgccttggcctgtggctcccagaggcctctgctgtgtagttgccgtggtaacattcaggcaccaggtctagtctggtgtgctatccttagcaacgtgccctcaccccacacccccacctctctagctaccttccccaccacttctcagtcatggaaattagacacggccctaaaatgagcgtaggcaaaatgaaggtgacaggctgagtccctgggaggctagaatggagtggttggtggccagggcaactccatatcccctgcttatgggtgtcttgctgcagggggtgtgggtatggctgccgtgcagctgtgccgtacagtggagaatgtgacagtgttcggaacggcctcggccagcaagcacgaggcactgaaggagaatggggtcacacatcccatcgactatcacacgactgactacgtggatgagatcaagaagatttcccctaaaggtggggggcataatatgggagggggtagggaggcacaggacagggaggggagctccagatctgtggatcctaatgttgttcttgggttcccctactctatgacaggagtggacattgtcatggaccctctgggtgggtcagatactgccaagggctacaacctcctgaaacccatgggcaaagtcgtcacctatggtgagttagtgggccagggatggagagagcatgtgagggcaggagggagggtctaaggggtgggatatagaggccagggcttttgaatgaagaaggggtagggactcaggtgctctgtagacgatcagggttaggaatggtcctgtatgctgcattcagattgctgactcttgggtaccagctcttttcattctctgtcacaacttttcatatgagtgatagtaaattctacattcttttttttggttttttttttgagatggagtttcgctcttgtcgcccaggctggagtgcaatggcatgatctcggtcagtgcaacctctgcctcctgggttcaagcgattctcctgcctcaccctcccgagtagctggaattacaggtgtctgccaccacgcccaactaatttttgtatttttagtagaggcggtgtttcaccatgttggccaggctggtcttgaactcctgatctcaggtgatccagccgcctcagcctcccaaagtgctgggattatagccgtgagccaccacgcctggccaaattctacattcttgtttggggattattcttgaacaaccagcctgccttctttctgtcctacctccctgagcatcttaggcagggtgcattttcatttaaaaaagtatttcatacaacaaaataagccaggcatggtggctcatgcctgtaatcccagcactttggaaggccagggcaggcagatggcttgagcctagaaattcgagaccagcctggtcaacatggtgtaccttatctccacaaaaaatacaaaaattagccaggtgtggtggcactgtactccagcctgggcaacagagcgagaccctgactcaaacaaatgaacaaacaagcaaatacataaagattagagcaatttttttttttttgagacagaatatcactctgttacccatcctggagtgcagtggcgcaacctcggctctctgcagcatccacctccctggttcaagcagttctgcctcaggctcctgagtagctggaattacaggtgcccatctccacgcctggcttttttttttttctttttcttgagacagagtctggctgtcacccaggctggagtgcagtgacacgatctcggctcactgcaacctccacctcccggattcaagcaattcttctgcctcagcctcccaagtagctgggactgcgggcgcacgccaccatacctggctaatttttgtattgttgtgggtttttttgtttgttttgttttgttttttttttttgagacggagtttcgctctttttgcccaggctgaagtgcagtggcgcgatctcggctcactgcaacctccgcctcccgggttcaagcgattctcctgcctcagacttcctgagtagctgggattacaggcatgtaccaccatgcccagctaattttgtattttcagtagagacggggtttctccatgttggtcacgctggtctcgaactcctgacgtccagtgatccgcccacctcggcctcccaaagtgctgggattataggcgtgagccaccatacccggccaacacctggctaattttcgtattttttagtagagacaaggtttcaccattttgggcaggctggtctcgaactcctgacctcaagtgatccccccaccttggcttcccagagtgctgggattatggatgtgagccatagcacccagcccctagagcaatttaaagtcagccagggttggtttgggcctggtaaccagcagtttgagaattatccaatcactccctggcactggtgtggagaattgcaaggggatcacagggaacagagagcacagatgcagacacacagggatgtgcctgggggggttcacaggctatgtcaccttgtccttcaggaatggccaacctgctgacgggccccaaacggaacctgatggccctggcccggacatggtggaatcagttcagcgtgacagctctgcagctgctgcaggccaaccgggctgtgtgtggcttccacctgggctacctggatggtgaggtggagctggtcagtggtgtggtggcccgcctcctggctctgtacaaccagggccacatcaagccccacattgactcagtctggcccttcgagaaggtgaatgtgaggactttgcagggagggcttgggtaggactcatgaaggctggggtcccaaggggcagattcctggggaagaggagggctgcctgcatcacactggcccctgttggatgagggttggatagcactgggagccgcatctttccttcctccccaggtggctgatgccatgaaacagatgcaggagaagaagaatgtgggcaaggtcctcctggttccagggccagagaagcagaactagggcaagtggctgtgagaccctagagaccagcgaagggagaagttgggaagctacgttctgttggccaccagacttgcatttcagcctctgtcataatgctctgccctccctcccccgaagttctctgtggtgatgaccgctctcccctgcccctccccgcttcctgacctctgaagaggttgggaagtgaccatttggatgtctgggccctgccaaggcgacagggagggtcagagggaggccggctgcttcctgcccccaccctttccccgggcctgctgtgctgcttttgtgccaaggttagccagtcccccctgttgtgttccatgtgctttcacctctgcctcatctttcctcccgtccctgccccgccacctccccaaagaattgaaacgtcagctcaggatatggggccaatctctgtgagtccagcatgtacctgtctctccctagtgtcccttcagcctgggctgaccagtgcccgcctctgggcttgaccagttcccaatctcgtcctctgtccccaacttcttaagcacaattgggcttcttccatctccaggttttctgccattcttaaccaaggctgcctcttccaacagggcgggaatcagacctactcccctaggtcacaactctgggaaggatacagagcccccacccttcactgagttctctggatttgttctcagtgccttagcaacgaaaacctgtgcttgtgtgtgtgtggcggcggggagggaggatcctgtttcccacctccttctcctcccctgtactccccagtgccttccttgttctggtggagctggggtttctctcctccccagtcccacaacactgccaaaaatctgtgtatgtgccattgggtggggcagccccaagcctcctggggaggcagggcaaaaacaggtgccctcatcgtggtctgtgccatgtcccgtctctatggtggttgaggagaaaggcggggaagcttcctcagccttgcagatatgtgtggcatttactagccagagctctgaaaggcagtgctgtctgtttcttgtactgggaccaaagtaaaaatccaagcacattccccttgcagttaggggaggccctactgccttctcaaagcagagaggcagcttatcaaactcagcccaaaactctgtttacatgggtggggagatggagcagggaagtacagagtgggatggtcaggacctgggccattgcaaccaaaatggggacttcctgggtagggaggtcactccctctactcactgagctaggattagggagggttattgccccaaccattgcaatgggaggtggagggacaggctcagcctcctcattgtctaaatgaggcctaaatgtgtgaagtgcgatttctgcttttgtgtaccccaccaccccattaccacagctgcctttgtgtgtttgtgtcaataaaaagccaaaccctgggtcctgcttgttgcctctgagagtggagggaaggtgagctcctggaaggctagtgctgccagcagaagatctgggctgcttcctgccccctgcctctttccatgcccaaatcacgtttcctttcatgagtgaaatgaggaagaacatcatggcatgcaggctctttttactgttctgggcagtgttttgcaatgtgtgacccctccgcactgttggtgaacatacagacctcctatatgggcacccaagcccaggccagtgtgagaaccttggcgggggggtggggaggatgagaaggggaggcccctagcctgactcagaggtgaagactgctaggccctgctgtccttggggtacgactgtcagggcctctacctccccgcccccgcgggtgggcttctggaagtggatctccaggacgtcatgcagctccgggccatccaagatatcaggaatgttgagcaccagtaccgagcggggaactggctgcgacctgatctggaaaaggagccaggagatggcaaaggctcatgggagaagggctgggggctgggggtagggcaggcagtgccccatgggggtatgaggtcgggaggcctggagaggctgatggtgggtaggtaggtcagtggggtttggggcctctgatccttcattgggcaagttcctggcaggcagacaggttacccagcccagcccctgttcttcacccctcctgcttacctcagccttctggatctccccattcacatacggagagactctcagagggacttgctgcccacccagtggcactgtgaactggccgatttggcacagacgctgagccactgtggggagcaaggaggggtgggcctttagcatcaagccctctcctctccctgcaccataatcttgcacaccctataccctctcccctgcaggaggcctgcatagccctcacctccatccctagcaaaccccagcatgacactccctggcagtagctcccgaacgtccacatcgccacctccgttcctagtcttgccaaagaagatctctagcttgtccagcagctcctcctcactcagcctgaggctggcaggaaatccagtgaccaacaccctccggccactcaactggctggacacctagggggagacagcaaggggtggtcccagacacagctccacttccccatgcccaggtgcatggcatgctttgcatgccccaggattctgtcataccatcacctggatggtggtgaccatgggcagctccaagggctggacctgcacccgcagccggcactcctccatgttgatcgtgtgctccttttgttgcagcacctgctcagccactgggtggtgggaaacagggtcagtactgggaaccctccccacctccctcctgaggctccccatgagcttacctttggggtcatcaaaggtgatcagagcagagcccgcaagcagagggcagtggatccgcaaattggaaactaaagacttaggcacttccgggtcctgctgggtgtgtcctcggaataccagggggatcttgggcactgaaaatgggacctggaagtaggggaggggagtaggagtgttcctcactcccacctaggaggaaggcatctccgattccattccattgatgctgagtgccggagataaatacatttactgaaagaaaagctggataaatgagtggatgaatgcaggtctggtccatacagggcaatttacatacaacatcttaatttgtcctgggaggtgggtagctctactttacagatgttcaagtaacataatggaggtcacacagcaaggaagtagcagagccaggaataaaaccgagaactccccagctcttttttgtgtttctttgttttaaagggagtcttgctctgtcacccagctggagtgtagtggcatgatcttggctcactgcaacctccacttcccaggttcaagcaattcggactcagcctcccaagtagctgggattacaggcatgtgccaccaaacccagctaatttttgtatttttagtagagacggggtttcaccctgttggccaggctggtctcaaactgacctcaggtgatccaccagcctcggcctcccaaagtgctgggattacaggcgtgagccactgcgcccggcctaatttttgtatttttagtagagatgggatttcactgtgttggccaggctggtctcaaactcctgacctgaggtgatcaggcccccttggcctaccaaagtgctgggtttacaggtgtgagccaccgcacccggcctcgccagctcgtttttaccaaacaacaccagatcctttagggggggttattgcgggcggatttttgaaacggagggctggtgataggctttttataggtatgcatgtatatggttctagcgtagtggattttgggaattgcggt

SEQ ID NO: 135 - DNA, 2961 bp, Homo sapiens
aagagatgatttctccatcctgaacgtgcagcgagcttgtcaggaagatcggaggtgccaagtagcagagaaagcatcccccagctctgacagggagacagcacatgtctaaggcccacaagccttggccctaccggaggagaagtcaattttcttctcgaaaatacctgaaaaaagaaatgaattccttccagcaacagccaccgccattcggcacagtgccaccacaaatgatgtttcctccaaactggcagggggcagagaaggacgctgctttcctcgccaaggacttcaactttctcactttgaacaatcagccaccaccaggaaacaggagccaaccaagggcaatggggcccgagaacaacctgtacagccagtacgagcagaaggtgcgcccctgcattgacctcatcgactccctgcgggctctgggtgtggagcaggacctggccctgccagccatcgccgtcatcggggaccagagctcgggcaagagctctgtgctggaggcactgtcaggagtcgcgcttcccagaggcagcggaatcgtaaccaggtgtccgctggtgctgaaactgaaaaagcagccctgtgaggcatgggccggaaggatcagctaccggaacaccgagctagagcttcaggaccctggccaggtggagaaagagatacacaaagcccagaacgtcatggccgggaatggccggggcatcagccatgagctcatcagcctggagatcacctcccctgaggttccagacctgaccatcattgaccttcccggcatcaccagggtggctgtggacaaccagccccgagacatcggactgcagatcaaggctctcatcaagaagtacatccagaggcagcagacgatcaacttggtggtggttccctgtaacgtggacattgccaccacggaggcgctgagcatggcccatgaggtggacccggaaggggacaggaccatcggtatcctgaccaaaccagatctaatggacaggggcactgagaaaagcgtcatgaatgtggtgcggaacctcacgtaccccctcaagaagggctacatgattgtgaagtgccggggccagcaggagatcacaaacaggctgagcttggcagaggcaaccaagaaagaaattacattctttcaaacacatccatatttcagagttctcctggaggaggggtcagccacggttccccgactggcagaaagacttaccactgaactcatcatgcatatccaaaaatcgctcccgttgttagaaggacaaataagggagagccaccagaaggcgaccgaggagctgcggcgttgcggggctgacatccccagccaggaggccgacaagatgttctttctaattgagaaaatcaagatgtttaatcaggacatcgaaaagttagtagaaggagaagaagttgtaagggagaatgagacccgtttatacaacaaaatcagagaggattttaaaaactgggtaggcatacttgcaactaatacccaaaaagttaaaaatattatccacgaagaagttgaaaaatatgaaaagcagtatcgaggcaaggagcttctgggatttgtcaactacaagacatttgagatcatcgtgcatcagtacatccagcagctggtggagcccgcccttagcatgctccagaaagccatggaaattatccagcaagctttcattaacgtggccaaaaaacattttggcgaatttttcaaccttaaccaaactgttcagagcacgattgaagacataaaagtgaaacacacagcaaaggcagaaaacatgatccaacttcagttcagaatggagcagatggttttttgtcaagatcagatttacagtgttgttctgaagaaagtccgagaagagatttttaaccctctggggacgccttcacagaatatgaagttgaactctcattttcccagtaatgagtcttcggtttcctcctttactgaaataggcatccacctgaatgcctacttcttggaaaccagcaaacgtctcgccaaccagatcccatttataattcagtattttatgctccgagagaatggtgactccttgcagaaagccatgatgcagatactacaggaaaaaaatcgctattcctggctgcttcaagagcagagtgagaccgctaccaagagaagaatccttaaggagagaatttaccggctcactcaggcgcgacacgcactctgtcaattctccagcaaagagatccactgaagggcggcgatgcctgtggttgttttcttgtgcgtactcattcattctaaggggagtcggtgcaggatgccgcttctgctttggggccaaactcttctgtcactatcagtgtccatctctactgtactccctcagcatcagagcatgcatcaggggtccacacaggctcagctctctccaccacccagctcttccctgaccttcacgaagggatggctctccagtccttgggtcccgtagcacacagttacagtgtcctaagatactgctatcattcttcgctaatttgtatttgtattcccttccccctacaagattatgagaccccagagggggaaggtctgggtcaaattcttcttttgtatgtccagtctcctgcacagcacctgcagcattgtaactgcttaataaatgacatctcactgaacgaatgagtgctgtgtaagtgatggagatacctgaggctattgctcaagcccaggccttggacatttagtgactgttagccggtccctttcagatccagtggccatgccccctgcttcccatggttcactgtcattgtgtttcccagcctctccactcccccgccagaaaggagcctgagtgattctcttttcttcttgtttccctgattatgatgagcttccattgttctgttaagtcttgaagaggaatttaataaagcaaagaaactttttaaaaacgt

SEQ ID NO: 136 - DNA, 3639 bp, Homo sapiens
aagtcttctgaattgtttttctggacttccaaatctcaagtgataagaccagcagaagcagatataaagacctgaagatagtcttttctgtccaaagatggaaaacagtactactaccatttctcgggaggagcttgaagaactacaagaggcatttaataaaatagatattgacaatagtgggtatgtcagtgactatgaacttcaagacctgtttaaggaagcaagccttcctctgcctggctacaaggtgcgcgagattgtggagaaaattctatcagttgctgacagcaacaaagatggcaaaatcagttttgaagagtttgtgtcactaatgcaagaattaaaaagcaaagatatcagcaaaacattccgaaaaataattaacaagagggaagggattactgctattggaggaacttcaactatttccagtgagggcacacagcattcttattcagaggaagaaaaagtggcttttgttaactggataaacaaagccctggagaatgaccctgactgtaagcatcttatacccatgaatcccaatgatgatagtcttttcaagtcacttgcagatggcatccttctttgcaaaatgatcaacttatctgaaccagatacaattgatgaaagagccatcaataagaaaaagctcacgccattcactatttctgaaaatttaaacctagctctgaattctgcctcagccattggttgtacagtggtcaacattggtgcatcagatctcaaagaaggaaaacctcacttggtcttgggacttctctggcagatcatcaaagttggcctttttgctgatattgagatttccaggaatgaagctctgattgcattgttaaatgaaggtgaggaactagaggagctgatgaagctttctcccgaggaattactgctgcgatgggtgaactaccatctgaccaatgcaggatggcataccatcagcaacttcagccaagacattaaggactcgagagcctattttcatctgcttaatcagattgcccctaaaggtggggaagatggacctgccattgccattgacctttcaggaattaatgagacaaatgacctgaagcgtgctggactcatgcttcaagaagcagataaactgggctgcaaacagtttgttactcctgcagatgtggtttcaggcaatcctaaacttaatttagcttttgtagctaatttgtttaacacatacccgtgcctgcacaagccgaataataatgacatcgatatgaatttactggaaggagagagcaaggaagagagaacatttcggaactggatgaattccttgggagtcaacccatacattaatcatttgtacagtgaccttgcagatgctttagtgatctttcagctctatgagatgatccgagtgccagtcaactggagccatgtcaacaaacctccttatcctgcccttggagggaacatgaagaagattgaaaactgtaactatgcagtggaacttgggaagaacaaggccaaattctccttggttggcattgctgggcaggacctaaatgaaaggaattcaacacttaccctggcattggtatggcagctgatgagaaggtacacattgaatgtgttatcggatcttggagagggtgaaaaagtaaatgatgaaattataattaaatgggtcaatcagactcttaaaagtgcaaacaaaaagacttctatttccagcttcaaggataaatctataagcacaagtttacctgtcctagatttaatagatgccattgcgccaaatgcagttcgtcaagaaatgatcaggagagaaaacttatctgatgaggacaagctgaacaatgctaaatacgccatttcagttgctcgaaagatcggtgcccggatatatgcattacctgatgacctcgtagaagtgaaaccaaagatggttatgacggtgtttgcatgcttaatgggaaaaggactgaacagaataaaataatcatttcatatgattttctgccacattaaacatattgtatgcctcacagtttacaggattctgaaatgtagtgggtgtaaaaccagagattatttgtatgctcaaaatagttatatattcattaatgaattcaatatcctgttcatactagttagagctggtcagcctttttgggtaacacagttaatttaccaactgatacagataatagaatatattcataatcaagctgatacttcatgattaaattatttttgttgcttaaaagtcgtattagacaagactaaatcattcttttttatggttcaaaaaagatgaatacaaacgtttttgcaggttctgctgtgaaatgtggtttgatttttttggtgtgttaattttgatcataaatgcattcatactcataatccagtttaatccttttatttgcttcctccaactatttaaagtggtccaaaaacacttttctgtaagtttctatactgtctaaaaccttatggtgaccagaattgtttattaatatcaaacttttttatatatgagaactaattcttgaataaaccccaaagttcactctcttgtttaagtagcagcagctttttacttaaaatttaattttaactacattgatactttacacatcctagtttggtaacacagctttaactatgtcatgcaacatatatatgttggtaggatgttattagagagatatgtgtgcatatatatttttttgcacctgaatcacccagcttttcataagtggtatgtttaattggtcattcagccaaccatcagtattttccccccacgacatgtgtaacacttttcagtctgtggatatctgatacattaagatttctttttataagtattcattttgaatgtgcatatagtcatttgaccccttccaaatacttgtagccaaacattggctagaacatcccaagatatgctgacactgtcctgttagcttcatattatacttgctagtttaggtctctatagaagccctatataatttagaatatgcccactgaatatctttaatagaaagtaacataaagctagtattcaatgtagagtattttcatatgtttttcacagcccgttacaaattggcaatgtttggttaatgtttgtattacttggaaatcgctacagcttggactatttttttctaaatttttagcattagtccatttctgctgctaacaattgaatccagaaatctactttctccatcttccactgttagtgccagtgagcaatactgttgtgcaacaaaaatgtcactttatctcagtgtgaatgagtagtctaaattccctttctaccattgatttaaatatatatattggtaagagagactgcccatgtgtttagaatagaattttttaaatgaaatgatcaacaggtggaatttgaaatatattcttctacaaaagagatttctttcccttttatattttgatgattgttttcttaagattaagatatgttcttgctcttttataagattatttaaattatgtttccctctgattttttttcaccattgtatttactaagttattggatttacatgaaatctggcactttagggtgttctttttctcacagagtatatttaataaaaatgctgtgtatat

SEQ ID NO: 137 - DNA, 1413 bp, Homo sapiens
atgaccacctgcagccgccagttcacctcctccagctccatgaagggctcctgcggcatcggaggcggcatcggggcgggctccagccgcatctcctccgtcctggccggggcctcctgccctgccagcacctacgggggcgcctctgtctcctctcgcttctcctctgggggagcctgcgggctggggggcggctatggcggtggcttcagcagcagcagcagctttggtagtggcttcgggggaggatatggtggtggccttggtgctggcttcggtggtggcttgggtgctggctttggtggtggttttgctggtggtgatgggcttctggtgggcagtgagaaggtgaccatgcagaacctcaatgaccgcctggcctcctacctggacaaggtgcgtgctctggaggaggccaacgccgacctggaagtgaagatccgtgactggtaccagaggcagcggcccagtgagatcaaagactacagtccctacttcaagaccatcgaggacctgaggaacaagatcattgcggccaccattgagaatgcgcacgcccttttgcagattgacaatgccaggctggcagccgatgacttcaggaccaagtatgaggcacgaactggcctgcggcagactgtggaggccgacgtcaatggcctgcgccgggtgttggatgagctgaccctggccaggactgacctggagatgcagatcgaaggcctgaaggaggagctggcctacctgaggaagaaccacgaggaggagatgcttgctctgagaggtcagaccggcggagatgtgaacgtggagatggatgctgcacctggcgtggacctgagccgcatcctgaatgagatgcgtgaccagtacgagcagatggcagagaaaaaccgcagagacgctgagacctggttcctgagcaagaccgaggagctgaacaaagaagtggcctccaacagcgaactggtacagagcagccgcagtgaggtgacggagctccggagggtgctccagggcctggagattgagctgcagtcccagctcaggatgaaagcatccctggagaacagcctggaggagaccaaaggccgctactgcatgcagctgtcccagatccagggactgattggcagtgtggaggagcagctggcccagctacgctgtgagatggagcagcagagccaggagtaccagatcttgctggatgtgaagacgcggctggagcaggagattgccacctaccgccgcctgctggagggcgaggatgcccacctttcctcccagcaagcatctggccaatcctattcttcccgcgaggtcttcacctcctcctcgtcctcttcagccgtcagacccggcccatcctcagagcagagctcatccagcttcagccagggccagagctcctag

SEQ ID NO: 138 - DNA, 4157 bp, Homo sapiens
agcggggcggggcgccagcgctgccttttctcctgccgggtagtttcgctttcctgcgcagagtctgcggaggggctcggctgcaccggggggatcgcgcctggcagaccccagaccgagcagaggcgacccagcgcgctcgggagaggctgcaccgccgcgcccccgcctagcccttccggatcctgcgcgcagaaaagtttcatttgctgtatgccatcctcgagagctgtctaggttaacgttcgcactctgtgtatataacctcgacagtcttggcacctaacgtgctgtgcgtagctgctcctttggttgaatccccaggcccttgttggggcacaaggtggcaggatgtctcagtggtacgaacttcagcagcttgactcaaaattcctggagcaggttcaccagctttatgatgacagttttcccatggaaatcagacagtacctggcacagtggttagaaaagcaagactgggagcacgctgccaatgatgtttcatttgccaccatccgttttcatgacctcctgtcacagctggatgatcaatatagtcgcttttctttggagaataacttcttgctacagcataacataaggaaaagcaagcgtaatcttcaggataattttcaggaagacccaatccagatgtctatgatcatttacagctgtctgaaggaagaaaggaaaattctggaaaacgcccagagatttaatcaggctcagtcggggaatattcagagcacagtgatgttagacaaacagaaagagcttgacagtaaagtcagaaatgtgaaggacaaggttatgtgtatagagcatgaaatcaagagcctggaagatttacaagatgaatatgacttcaaatgcaaaaccttgcagaacagagaacacgagaccaatggtgtggcaaagagtgatcagaaacaagaacagctgttactcaagaagatgtatttaatgcttgacaataagagaaaggaagtagttcacaaaataatagagttgctgaatgtcactgaacttacccagaatgccctgattaatgatgaactagtggagtggaagcggagacagcagagcgcctgtattggggggccgcccaatgcttgcttggatcagctgcagaactggttcactatagttgcggagagtctgcagcaagttcggcagcagcttaaaaagttggaggaattggaacagaaatacacctacgaacatgaccctatcacaaaaaacaaacaagtgttatgggaccgcaccttcagtcttttccagcagctcattcagagctcgtttgtggtggaaagacagccctgcatgccaacgcaccctcagaggccgctggtcttgaagacaggggtccagttcactgtgaagttgagactgttggtgaaattgcaagagctgaattataatttgaaagtcaaagtcttatttgataaagatgtgaatgagagaaatacagtaaaaggatttaggaagttcaacattttgggcacgcacacaaaagtgatgaacatggaggagtccaccaatggcagtctggcggctgaatttcggcacctgcaattgaaagaacagaaaaatgctggcaccagaacgaatgagggtcctctcatcgttactgaagagcttcactcccttagttttgaaacccaattgtgccagcctggtttggtaattgacctcgagacgacctctctgcccgttgtggtgatctccaacgtcagccagctcccgagcggttgggcctccatcctttggtacaacatgctggtggcggaacccaggaatctgtccttcttcctgactccaccatgtgcacgatgggctcagctttcagaagtgctgagttggcagttttcttctgtcaccaaaagaggtctcaatgtggaccagctgaacatgttgggagagaagcttcttggtcctaacgccagccccgatggtctcattccgtggacgaggttttgtaaggaaaatataaatgataaaaattttcccttctggctttggattgaaagcatcctagaactcattaaaaaacacctgctccctctctggaatgatgggtgcatcatgggcttcatcagcaaggagcgagagcgtgccctgttgaaggaccagcagccggggaccttcctgctgcggttcagtgagagctcccgggaaggggccatcacattcacatgggtggagcggtcccagaacggaggcgaacctgacttccatgcggttgaaccctacacgaagaaagaactttctgctgttactttccctgacatcattcgcaattacaaagtcatggctgctgagaatattcctgagaatcccctgaagtatctgtatccaaatattgacaaagaccatgcctttggaaagtattactccaggccaaaggaagcaccagagccaatggaacttgatggccctaaaggaactggatatatcaagactgagttgatttctgtgtctgaagttcacccttctagacttcagaccacagacaacctgctccccatgtctcctgaggagtttgacgaggtgtctcggatagtgggctctgtagaattcgacagtatgatgaacacagtatagagcatgaatttttttcatcttctctggcgacagttttccttctcatctgtgattccctcctgctactctgttccttcacatcctgtgtttctagggaaatgaaagaaaggccagcaaattcgctgcaacctgttgatagcaagtgaatttttctctaactcagaaacatcagttactctgaagggcatcatgcatcttactgaaggtaaaattgaaaggcattctctgaagagtgggtttcacaagtgaaaaacatccagatacacccaaagtatcaggacgagaatgagggtcctttgggaaaggagaagttaagcaacatctagcaaatgttatgcataaagtcagtgcccaactgttataggttgttggataaatcagtggttatttagggaactgcttgacgtaggaacggtaaatttctgtgggagaattcttacatgttttctttgctttaagtgtaactggcagttttccattggtttacctgtgaaatagttcaaagccaagtttatatacaattatatcagtcctctttcaaaggtagccatcatggatctggtagggggaaaatgtgtattttattacatctttcacattggctatttaaagacaaagacaaattctgtttcttgagaagagaatattagctttactgtttgttatggcttaatgacactagctaatatcaatagaaggatgtacatttccaaattcacaagttgtgtttgatatccaaagctgaatacattctgctttcatcttggtcacatacaattatttttacagttctcccaagggagttaggctattcacaaccactcattcaaaagttgaaattaaccatagatgtagataaactcagaaatttaattcatgtttcttaaatgggctactttgtcctttttgttattagggtggtatttagtctattagccacaaaattgggaaaggagtagaaaaagcagtaactgacaacttgaataatacaccagagataatatgagaatcagatcatttcaaaactcatttcctatgtaactgcattgagaactgcatatgtttcgctgatatatgtgtttttcacatttgcgaatggttccattctctctcctgtactttttccagacacttttttgagtggatgatgtttcgtgaagtatactgtatttttacctttttccttccttatcactgacacaaaaagtagattaagagatgggtttgacaaggttcttcccttttacatactgctgtctatgtggctgtatcttgtttttccactactgctaccacaactatattatcatgcaaatgctgtattcttctttggtggagataaagatttcttgagttttgttttaaaattaaagctaaagtatctgtattgcattaaatataatatgcacacagtgctttccgtggcactgcatacaatctgaggcctcctctctcagtttttatatagatggcgagaacctaagtttcagttgattttacaattgaaatgactaaaaaacaaagaagacaacattaaaacaatattgtttcta

SEQ ID NO: 139 - DNA, 1072 bp, Homo sapiens
ggtatttcagacgtcttgacttgcccagtaacttacctggattgattctttcttctgagcactgtaacaagtattcaaagattccccgccactgtatgtctgaagatagcaaatatgttttaatacaaatgttatgggacaatatgaagttacatcaggatccgggacagcccttgtacattctctggaatgcacacacccaaaaatatccaatggtccatttattgcaaaaaagtgataactcatttaaccaggaactgttgaaaagtatggtaaaaagcattaaaatgaatgatgtctatggaccaatgagtcagattttagagacactgaataagtgtccacattttaaaagacagaggagtttatacagagaaatactatttctctcacttgtggcactgggaagagaaaacattgatatagatgcttttgataaagagtacaagatggcatacgatcgtctcacacctagtcaagtcaagagtacacacaactgtgatagaccaccaagtacaggggtgatggaatgtcgaaaaacctttggagaaccttatctttaagatgtatttgtatgtgtaaacattcaatgtatattgtatagtcagtgtataaaataacacttttagactctaaatattttttcttcaatttttgaaaatacaatttgtaaatggttcaaaagactcagacagcttatgtacagaatgtttgaagaagagaatagtgacaagtggggagaaagccactttgtttctcatttcttttttcttcttctttaactcccctgtaataggaaataaagtatttttgtgatgaggaaatccctaaacaaaattagttgccataaaatatgacaactgctttatggtttcttttggaagagacagattgaaaaatcatgaatggaatctaaacagaaatgtcagatgaacgtatttcctgttttcatagactattcaaatgttttgaccatgaagttgtattatacatattttaaattgtttatagtaagttgatatttttttaatttttaaatttaatatagcaaacttaaaatgaatttaaactt

SEQ ID NO: 140 - DNA, 3240 bp, Homo sapiens
gtctgagtcttgcgtgggtcctctatatagggtgagaagcgtggcgctcggttcctgcctcggggaagtcctggcgcagatgggccacggggccggcgtggcggcgcctgggaccgactgaggcctaggcgccggagccggccgcgcctgggctggagcggggctcctcggcctggactgggagcccccggccccgggctcctgctggcgccgtccaaccttacatgggttcagggcgccttcgtaggcgggcacggctggtttcgggctaaggcgctctggagacctgacgatggcgtcgggcccgggctcccaggaacgggaagggctcctgatagtgaagctggaggaggactgcgcctggagccaggagctgcccccacctgacccaggaccgagccccgaggcctcccacttgcgcttcagacggttccgcttccaagaggcagctggtccccgggaagccctcagccggctccaagagctttgccatgggtggcttcggcctgagatgcgcacgaaggagcagatcttggagctgctggtgttagagcagttcctgaccatcctgccccaggagatccagagcagggtgcaggagctgcatccggagagcggcgaagaagcggtgacccttgtggagggtatgcagagagagcttgggagactgagacaacaggtcacaaaccatgggcggggaacagaagtgcttttggaggagcctttgcctctggaaacagcacgagagtcaccgagcttcaagctggagccaatggagactgagcgaagccctggccccaggctgcaggagctgctaggccccagcccccaaagggacccccaggctgtaaaggagagggcattatctgctccctggctttctctttttcctcctgaagggaacatggaagacaaggagatgactgggccccagttgcctgagagcttagaggacgtggcaatgtacatctcccaggaggagtgggggcatcaggatcctagtaagagggccctctccagggacacggtgcaggagagttatgagaatgtggactcactggagtctcacattcccagtcaggaggtcccaggcacccaggtgggacaaggaggaaagctatgggatcccagtgtccagagctgcaaggagggcctgagccccagaggcccagctccaggagaagagaaatttgagaacctggaaggtgttccgtctgtatgctctgagaacatccaccctcaggtgctgcttcctgaccaggcccgaggggaggtgccctggagtcctgagctgggaagacctcatgaccggtcgcaaggggattgggcgcctcccccagagggtggaatggagcaggccttggcaggagcctcaagtggcagagaactggggcgaccgaaggaactgcagccaaagaaactccatttatgtcccttgtgtggcaaaaatttctctaacaactcaaacctaattaggcaccagagaatacatgcagctgaaagactgtgtatgggtgtggactgcactgaaatctttggtgggaacccacgtttcctgtcactacacagagcacacctgggagaggaggcccacaagtgccttgaatgtgggaaatgcttcagtcagaacacccatctgactcgccaccaacgcacccacacgggtgagaagccctatcagtgcaacatttgcggaaaatgtttctcctgcaactccaacctccacaggcaccagagaacgcacactggggagaagccctacaagtgccctgagtgtggggagatctttgctcacagttccaacctccttcggcaccagagaattcacactggagagcgaccttataagtgtcccgagtgtgggaaaagtttctctcggagttcacacctcgtcattcacgaaagaactcatgagagagagagactttaccccttctctgagtgtggggaagctgtgagtgacagcaccccctttcttacaaaccatggagcccataaggcagagaagaagctctttgaatgtttgacttgtgggaaaagcttccggcagggcatgcacctcaccagacatcagagaacacacacaggagagaaaccgtataaatgtaccctttgtggggaaaacttctctcatagatccaatttaatcaggcaccagagaatccacacaggagaaaaaccctatacctgtcatgagtgcggagacagcttctctcacagctccaatcggattcgccacctgagaacgcatacgggagagagaccctataaatgttctgaatgtggagaaagcttctctcggagttcccgtcttatgagtcatcagagaactcacacaggttagtaacagtggggtttctctttgccccaggtgaggtggcatattcagaggagcctgttggcaagagctggtattccctgcccagccgaccaaatgacctctgcattcttcaggtaatgggggctcattgtgagggaggtgcagaggcagcagaggattggcataaaactgaaaaggagttctgtctgcatgagaaaggatggcaagtctctgaggtgacctcagggtggaattctctgttaagtccaccctgccccagggtgctcctaccctcttggtctttttaaagccaaggtgcgatttgggcacctgactgtccagtttaccttaacaagtttgggaatccatgtgatgtttttgatacttcttcctcatttgggacattcagtaggagcatttgggcttccggggcccctgagaccaaagaagaggggccaagtaccctgggaaatcagctgaaggtcaacaaaagactggttgtgagttgcagctgtcccgaaggccccagttgggaagccatgggcagtccagatcaagccaccacgtgccctacgatggcctaacaggagtgcccattggcagattacacatgtaaatatgacctcagacaaaaaggaaccagaggcccaagggcaataataaggtggaatttgcaggtcagcccaggaattggcagaggaagtaggtgtctgataaccctttgtggagaatgagattccccccacctgtgtgagaaaaataaacagctctggagtcttgttcctgactccagaggaacgagagcattccaggaaagagagattccctggaaaattgaaaatgtgaatcctagggggaaattggggattgtgtctttccctgttgaaaatgtttggatgggaataaatatcttcaggaaa

SEQ ID NO: 141 - DNA, 885 bp, Homo sapiens
ctcgaggccaagaattcggcacgagggaacctgtaaacgctctcggaattatggcggcggtggatatccgagacaatctgctgggaatttcttgggttgacagctcttggatccctattttgaacagtggtagtgtcctggattacttttcagaaagaagtaatcctttttatgacagaacatgtaataatgaagtggtcaaaatgcagaggctaacattagaacacttgaatcagatggttggaatcgagtacatccttttgcatgctcaagagcccattcttttcatcattcggaagcaacagcggcagtcccctgcccaagttatcccactagctgattactatatcattgctggagtgatctatcaggcaccagacttgggatcagttataaactctagagtgcttactgcagtgcatggtattcagtcagcttttgatgaagctatgtcatactgtcgatatcatccttccaaagggtattggtggcacttcaaagatcatgaagagcaaggtaagtagaacatccataccctcctaaaacactttttgatcctctgagaatgaagctgttttctttaggaaaatggctgttgatcttttctaagtgtgtttcactttttcatgggatgatggctttgttgcagctgagattcatgtaactagagtggtaataatagtttcacataggaacagatgcaagttcactctgttagttaactggtagtctttgttaaggtgattcaaggttttaaaatatttggggccaggtgtggtggctcactcctgtaatcccggcactttggaatgccaaggcaggtggatcacctgagcctaggagttcaagatcagcctgggcaacatagtgaaacctggtctctgc

SEQ ID NO: 142 - DNA, 1890 bp, Homo sapiens
ggcacccagggtccggcctgcgccttcccgccaggcctggacactggttcaacacctgtgacttcatgtgtgcgcgccggccacacctgcagtcacacctgtagccccctctgccaagagatccataccgaggcagcgtcggtggctacaagccctcagtccacacctgtggacacctgtgacacctggccacacgacctgtggccgcggcctggcgtctgctgcgacaggagcccttacctcccctgttataacacctgaccgccacctaactgcccctgcagaaggagcaatggccttggctcctgagagggcagccccacgcgtgctgttcggagagtggctccttggagagatcagcagcggctgctatgaggggctgcagtggctggacgaggcccgcacctgtttccgcgtgccctggaagcacttcgcgcgcaaggacctgagcgaggccgacgcgcgcatcttcaaggcctgggctgtggcccgcggcaggtggccgcctagcagcaggggaggtggcccgccccccgaggctgagactgcggagcgcgccggctggaaaaccaacttccgctgcgcactgcgcagcacgcgtcgcttcgtgatgctgcgggataactcgggggacccggccgacccgcacaaggtgtacgcgctcagccgggagctgtgctggcgagaaggcccaggcacggaccagactgaggcagaggcccccgcagctgtcccaccaccacagggtgggcccccagggccattcttggcacacacacatgctggactccaagccccaggccccctccctgccccagctggtgacaagggggacctcctgctccaggcagtgcaacagagctgcctggcagaccatctgctgacagcgtcatggggggcagatccagtcccaaccaaggctcctggagagggacaagaagggcttcccctgactggggcctgtgctggaggcccagggctccctgctggggagctgtacgggtgggcagtagagacgacccccagccccgggccccagcccgcggcactaacgacaggcgaggccgcggccccagagtccccgcaccaggcagagccgtacctgtcaccctccccaagcgcctgcaccgcggtgcaagagcccagcccaggggcgctggacgtgaccatcatgtacaagggccgcacggtgctgcagaaggtggtgggacacccgagctgcacgttcctatacggccccccagacccagctgtccgggccacagacccccagcaggtagcattccccagccctgccgagctcccggaccagaagcagctgcgctacacggaggaactgctgcggcacgtggcccctgggttgcacctggagcttcgggggccacagctgtgggcccggcgcatgggcaagtgcaaggtgtactgggaggtgggcggacccccaggctccgccagcccctccaccccagcctgcctgctgcctcggaactgtgacacccccatcttcgacttcagagtcttcttccaagagctggtggaattccgggcacggcagcgccgtggctccccacgctataccatctacctgggcttcgggcaggacctgtcagctgggaggcccaaggagaagagcctggtcctggtgaagctggaaccctggctgtgccgagtgcacctagagggcacgcagcgtgagggtgtgtcttccctggatagcagcagcctcagcctctgcctgtccagcgccaacagcctctatgacgacatcgagtgcttccttatggagctggagcagcccgcctagaacccagtctaatgagaactccagaaagctggagcagcccacctagagctggccgcggccgcccagtctaataaaaagaactccag

SEQ ID NO: 143 - DNA, 1816 bp, Homo sapiens
ggcacccagggtccggcctgcgccttcccgccaggcctggacactggttcaacacctgtgacttcatgtgtgcgcgccggccacacctgcagtcacacctgtagccccctctgccaagagatccataccgaggcagcgtcggtggctacaagccctcagtccacacctgtggacacctgtgacacctggccacacgacctgtggccgcggcctggcgtctgctgcgacaggagcccttacctcccctgttataacacctgaccgccacctaactgcccctgcagaaggagcaatggccttggctcctgagagggcagccccacgcgtgctgttcggagagtggctccttggagagatcagcagcggctgctatgaggggctgcagtggctggacgaggcccgcacctgtttccgcgtgccctggaagcacttcgcgcgcaaggacctgagcgaggccgacgcgcgcatcttcaaggcctgggctgtggcccgcggcaggtggccgcctagcagcaggggaggtggcccgccccccgaggctgagactgcggagcgcgccggctggaaaaccaacttccgctgcgcactgcgcagcacgcgtcgcttcgtgatgctgcgggataactcgggggacccggccgacccgcacaaggtgtacgcgctcagccgggagctgtgctggcgagaaggcccaggcacggaccagactgaggcagaggcccccgcagctgtcccaccaccacagggtgggcccccagggccattcttggcacacacacatgctggactccaagccccaggccccctccctgccccagctggtgacaagggggacctcctgctccaggcagtgcaacagagctgcctggcagaccatctgctgacagcgtcatggggggcagatccagtcccaaccaaggctcctggagagggacaagaagggcttcccctgactggggcctgtgctggaggcgaggccgcggccccagagtccccgcaccaggcagagccgtacctgtcaccctccccaagcgcctgcaccgcggtgcaagagcccagcccaggggcgctggacgtgaccatcatgtacaagggccgcacggtgctgcagaaggtggtgggacacccgagctgcacgttcctatacggccccccagacccagctgtccgggccacagacccccagcaggtagcattccccagccctgccgagctcccggaccagaagcagctgcgctacacggaggaactgctgcggcacgtggcccctgggttgcacctggagcttcgggggccacagctgtgggcccggcgcatgggcaagtgcaaggtgtactgggaggtgggcggacccccaggctccgccagcccctccaccccagcctgcctgctgcctcggaactgtgacacccccatcttcgacttcagagtcttcttccaagagctggtggaattccgggcacggcagcgccgtggctccccacgctataccatctacctgggcttcgggcaggacctgtcagctgggaggcccaaggagaagagcctggtcctggtgaagctggaaccctggctgtgccgagtgcacctagagggcacgcagcgtgagggtgtgtcttccctggatagcagcagcctcagcctctgcctgtccagcgccaacagcctctatgacgacatcgagtgcttccttatggagctggagcagcccgcctagaacccagtctaatgagaactccagaaagctggagcagcccacctagagctggccgcggccgcccagtctaataaaaagaactccagaacaaaaaaaaaa

SEQ ID NO: 144 - DNA, 1646 bp, Homo sapiens
ggctctggcacccagggtccggcctgcgccttcccgccaggcctggacactggttcaacacctgtgacttcatgtgtgcgcgccggccacacctgcagtcacacctgtagccccctctgccaagagatccataccgaggcagcgtcggtggctacaagccctcagtccacacctgtggacacctgtgacacctggccacacgacctgtggccgcggcctggcgtctgctgcgacaggagcccttacctcccctgttataacacctgaccgccacctaactgcccctgcagaaggagcaatggccttggctcctgagagggcagccccacgcgtgctgttcggagagtggctccttggagagatcagcagcggctgctatgaggggctgcagtggctggacgaggcccgcacctgtttccgcgtgccctggaagcacttcgcgcgcaaggacctgagcgaggccgacgcgcgcatcttcaaggcctgggctgtggcccgcggcaggtggccgcctagcagcaggggaggtggcccgccccccgaggctgagactgcggagcgcgccggctggaaaaccaacttccgctgcgcactgcgcagcacgcgtcgcttcgtgatgctgcgggataactcgggggacccggccgacccgcacaaggtgtacgcgctcagccgggagctgtgctggcgagaaggcccaggcacggaccagactgaggcagaggcccccgcagctgtcccaccaccacaggcccagggctccctgctggggagctgtacgggtgggcagtagagacgacccccagccccgggccccagcccgcggcactaacgacaggcgaggccgcggccccagagtccccgcaccaggcagagccgtacctgtcaccctccccaagcgcctgcaccgcggtgcaagagcccagcccaggggcgctggacgtgaccatcatgtacaagggccgcacggtgctgcagaaggtggtgggacacccgagctgcacgttcctatacggccccccagacccagctgtccgggccacagacccccagcaggtagcattccccagccctgccgagctcccggaccagaagcagctgcgctacacggaggaactgctgcggcacgtggcccctgggttgcacctggagcttcgggggccacagctgtgggcccggcgcatgggcaagtgcaaggtgtactgggaggtgggcggacccccaggctccgccagcccctccaccccagcctgcctgctgcctcggaactgtgacacccccatcttcgacttcagagtcttcttccaagagctggtggaattccgggcacggcagcgccgtggctccccacgctataccatctacctgggcttcgggcaggacctgtcagctgggaggcccaaggagaagagcctggtcctggtgaagctggaaccctggctgtgccgagtgcacctagagggcacgcagcgtgagggtgtgtcttccctggatagcagcagcctcagcctctgcctgtccagcgccaacagcctctatgacgacatcgagtgcttccttatggagctggagcagcccgcctagaacccagtctaatgagaactccagaaagctggagcagcccacctagagctggccgcggccgc

SEQ ID NO: 145 - DNA, 1940 bp, Homo sapiens
acccagggtccggcctgcgccttcccgccaggcctggacactggttcaacacctgtgacttcatgtgtgcgcgccggccacacctgcagtcacacctgtagccccctctgccaagagatccataccgaggcagcgtcggtggctacaagccctcagtccacacctgtggacacctgtgacacctggccacacgacctgtggccgcggcctggcgtctgctgcgacaggagcccttacctcccctgttataacacctgacagccacctaactgcccctgcagaaggagcaatggccttggctcctgagaggtaagagcccggcccaccctctccagatgccagtccccgagcgccctgcagccggccctgactctccgcggccgggcacccgcagggcagccccacgcgtgctgttcggagagtggctccttggagagatcagcagcggctgctatgaggggctgcagtggctggacgaggcccgcacctgtttccgcgtgccctggaagcacttcgcgcgcaaggacctgagcgaggccgacgcgcgcatcttcaaggcctgggctgtggcccgcggcaggtggccgcctagcagcaggggaggtggcccgccccccgaggctgagactgcggagcgcgccggctggaaaaccaacttccgctgcgcactgcgcagcacgcgtcgcttcgtgatgctgcgagataactcgggggacccggccgacccgcacaaggtgtacgcgctcagccgggagctgtgctggcgagaaggcccaggcacggaccagactgaggcagaggcccccgcagctgtcccaccaccacagggtgggcccccagggccattcctggcacacacacatgctggactccaagccccaggccccctccctgccccagctggtgacgagggggacctcctgctccaggcagtgcaacagagctgcctggcagaccatctgctgacagcgtcatggggggcagatccagtcccaaccaaggctcctggagagggacaagaagggcttcccctgactggggcctgtgctggaggcccagggctccctgctggggagctgtacgggtgggcagtagagacgacccccagccccgggccccagcccgcggcactaacgacaggcgaggccgcggccccagagtccccgcaccaggcagagccgtacctgtcaccctccccaagcgcctgcaccgcggtgcaagagcccagcccaggggcgctggacgtgaccatcatgtacaagggccgcacggtgctgcagaaggtggtgggacacccgagctgcacgttcctatacggccccccagacccagctgtccgggccacagacccccagcaggtagcattccccagccctgccgagctcccggaccagaagcagctgcgctacacggaggaactgctgcggcacgtggcccctgggttgcacctggagcttcgggggccacagctgtgggcccggcgcatgggcaagtgcaaggtgtactgggaggtgggcggccccccaggctccgccagcccctccaccccagcctgcctgctgcctcggaactgtgacacccccatcttcgacttcagagtcttcttccgagagctggtggaattccgggcacggcagcgccgtggctccccacgctataccatctacctgggcttcgggcaggacctgtcagctgggaggcccaaggagaagagcctggtcctggtgaagctggaaccctggctgtgccgagtgcacctagagggcacgcagcgtgagggtgtgtcttccctggatagcagcagcctcagcctctgcctgtccagcgccaacagcctctatgacgacatcgagtgcttccttatggagctggagcagcccgcctagaacccagtctaatgagaactccagaaagctggagcagcccacctagagctggcc

SEQ ID NO: 146 - DNA, 1922 bp, Homo sapiens
gcccctttctttctcctcgtcggcccgagagcaggaacacgataacgaaggaggcccaacttcattcaataaggagcctgacggatttatcccagacggtagaacaaaaggaagaatattgatggattttaaaccagagtttttaaagagcttgagaatacggggaaattaatttgttctcctacacacatagatagggtaaggttgtttctgatgcagctgagaaaaatgcagaccgtcaaaaaggagcaggcgtctcttgatgccagtagcaatgtggacaagatgatggtccttaattctgctttaacggaagtgtcagaagactccacaacaggtgaggacgtgcttctcagtgaaggaagtgtggggaagaacaaatcttctgcatgtcggaggaaacgggaattcattcctgatgaaaagaaagatgctatgtattgggaaaaaaggcggaaaaataatgaagctgccaaaagatctcgtgagaagcgtcgactgaatgacctggttttagagaacaaactaattgcactgggagaagaaaacgccactttaaaagctgagctgctttcactaaaattaaagtttggtttaattagctccacagcatatgctcaagagattcagaaactcagtaattctacagctgtgtactttcaagattaccagacttccaaatccaatgtgagttcatttgtggacgagcacgaaccctcgatggtgtcaagtagttgtatttctgtcattaaacactctccacaaagctcgctgtccgatgtttcagaagtgtcctcagtagaacacacgcaggagagctctgtgcagggaagctgcagaagtcctgaaaacaagttccagattatcaagcaagagccgatggaattagagagctacacaagggagccaagagatgaccgaggctcttacacagcgtccatctatcaaaactatatggggaattctttctctgggtactcacactctcccccactactgcaagtcaaccgatcctccagcaactccccgggaacgtcggaaactgatgatggtgtggtaggaaagtcatctgatggagaagacgagcaacaggtccccaagggccccatccattctccagttgaactcaagcatgtgcatgcaactgtggttaaagttccagaagtgaattcctctgccttgccacacaagctccggatcaaagccaaagccatgcagatcaaagtagaagcctttgataatgaatttgaggccacgcaaaaactttcctcacctattgacatgacatctaaaagacatttcgaactcgaaaagcatagtgccccaagtatggtacattcttctcttactcctttctcagtgcaagtgactaacattcaagattggtctctcaaatcggagcactggcatcaaaaagaactgagtggcaaaactcagaatagtttcaaaactggagttgttgaaatgaaagacagtggctacaaagtttctgacccagagaacttgtatttgaagcaggggatagcaaacttatctgcagaggttgtctcactcaagagacttatagccacacaaccaatctctgcttcagactctgggtaaattactactgagtaagagctgggcatttagaaagatgtcatttgcaatagagcagtccattttgtattatgctgaattttcactggacctgtgatgtcatttcactgtgatgtgcacatgttgtctgtttggtgtctttttgtgcacagattatgatgaagattagattgtgttatcactctgcctgtgtatagtcagatagtccatgcgaaggctgtatatattgaacattatttttgttgttctattataaagtgtgtaagttaccagtttcaataaaggattggtgacaaacacagaaaaaaaaaaaaaaaaaaaaa

SEQ ID NO: 147 - DNA, 4930 bp, Homo sapiens; identical to SEQ ID NO: 2

SEQ ID NO: 148 - DNA, 2206 bp, Homo sapiens
ctagtctttcagccttcaggctgtttttggcttgaagctctcttggcctcctagtttctacctaatcatgtccctggtggaggccatcagcctctggaatgaaggggtgctggcagcggacaagaaggactggaagggagccctggatgccttcagtgccgtccaggacccccactcccggatttgcttcaacattggctgcatgtacactatcctgaagaacatgactgaagcagagaaggcctttaccagaagcattaaccgagacaagcacttggcagtggcttacttccaacgagggatgctctactaccagacagagaaatatgatttggctatcaaagaccttaaagaagccttgattcagcttcgagggaaccagctgatagactataagatcctggggctccagttcaagctgtttgcctgtgaggtgttatataacattgctttcatgtatgccaagaaggaggaatggaaaaaagctgaagaacagttagcattggccacgagcatgaagtctgagcccagacattccaaaatcgacaaggcgatggagtgtgtctggaagcagaagctatatgagccagtggtgatccctgtgggcaagctgtttcgaccaaatgagagacaagtggctcagctggccaagaaggattacctaggcaaggcgacggtcgtggcatctgtggtggatcaagacagtttctctgggtttgcccctctgcaaccacaggcagctgagcctccacccagaccgaaaaccccagagatcttcagggctctggaaggggaggctcaccgtgtgctatttgggtttgtgcctgagacaaaagaagagctccaggtcatgccagggaacattgtctttgtcttgaagaagggcaatgataactgggccacggtcatgttcaacgggcagaaggggcttgttccctgcaactaccttgaaccagttgagttgcggatccaccctcagcagcagccccaggaggaaagctctccgcagtccgacatcccagctcctcctagttccaaagcccctggaaaaccccagctgtcaccaggccagaaacaaaaagaagagcctaaggaagtgaagctcagtgttcccatgccctacacactcaaggtgcactacaagtacacggtagtcatgaagactcagcccgggctcccctacagccaggtccgggacatggtgtctaagaaactggagctccggctggaacacactaagctgagctatcggcctcgggacagcaatgagctggtgcccctttcagaagacagcatgaaggatgcctggggccaggtgaaaaactactgcctgactctgtggtgtgagaacacagtgggtgaccaaggctttccagatgaacccaaggaaagtgaaaaagctgatgctaataaccagacaacagaacctcagcttaagaaaggcagccaagtggaggcactcttcagttatgaggctacccaaccagaggacctggagtttcaggaaggggatataatcctggtgttatcaaaggtgaatgaagaatggctggaaggggagtgcaaagggaaggtgggcattttccccaaagtttttgttgaagactgcgcaactacagatttggaaagcactcggagagaagtctaggatgtttcacaaactacaaagctgaagaaaatgaagccctattacttgtttgtaagatttagcacccttctgctgtatactgtactgagacattacagtttggaagtgttaactatttattccctgttaaaatttaacctactagacaatgatgtgagtacccaggatgatttcctggggcacagtgggtgaggagatggggacaggtgaatggaggagttaggggagaggaaaagtggatggaagtgtctggaaagggcacgagagagtcttccaggtactgatcctgtttcttgctctgagtgctagctagccagctgtgttcacactgtaaacattcatcaagctgtacatttggtgcacttttctgtgtcataccacaataaaaaaaaacctatcatcatcttacaaaaacaagacacccaagtccaggcccaaggagtaagtacaaatattcctgtttctgaaccattactgtaattggctcttaaggcttgaagtaaccttataggttactcataaggcatatacaaataaacttgtttgttttcttttttc

SEQ ID NO: 149 - DNA, 2508 bp, Homo sapiens
aataagaaagcagcttttccaagaaacaatacaatattactggccagatagtattattgattaattcaacaaacagttatgtagcatctactggtaccctggaactgtgctgaactttatagctacacagatgactaagacgcaatttggccttgccagttcatgactgagttatacatgaacagaacaagatcctcatgaaacctctgatatggacatggtcagatgttgaaggccagaggccggctctgctcatctgcacagctgcagcaggacccacgcagggagttaaggatctcgaggaagtgcctccatctgcagcgagtcagtcagcccaagcacgctgtgctctggggagctggggttatggcaagccctttgagccaagaagtgtgaaaaacatacactctactcctgcttacccagatgccacaatgcacagacaactcctggctccggtggaaggaaggatggcagagacattgaatcagaaactccatgttgccaatgtgctggaagatgaccccggctacctacctcacgtctacagcgaggaaggggagtgtggaggggccccatccctcagctctctggccagcttggaacaggagttgcaacctgatttgctggactctttgggttcaaaagcgactccgtttgaggaaatatattcagagtcaggtgttccttcctaaaaaaaaaaagtctattttggagaattgaaataattcatggaagggaatcactattccgggatttttcccctttgctcttcttttccctccttaaaagaaaaattaccttctagtcctaggatgaggacacactattagtttgaattaaatgctttgatattctcagatcagccatcttgaaccaaagcaaaaccacaagttacactttcttaaaatttgatttgtcatattttctagagaaacttgaatttaattgtgttattcttagcttccactggcagcctagctttgagggtaaatgaaaatataacccatagattacccagccacttgggaacagcaggtaatactgaagaaaaataaaaatagattttgaaaacgttacttacatttctatgattatgattctgcttccatttaagggaaaacttaggtaaatagagaaatttttttctataacatttgtagtcagtatttgaagtgattttttaaaaaataagtattggtccctgttcactttttgattagataaatagataaaatatgttatcttgagaaaaatgattatgctgaaagctttataaacagtatactctttaaaaaatgaagagctgacataatttaacttgtatgtattatgtaagtaaaagagttaggagcctttgaatgagtaagttctgattagattttatctttaaacaaaaccacaaaatttaattggtttttacttgtccacttactgctagtgtcagtttcaggggaagaaatggtttcttttaaaaatcttaataggggacatatgccctaaaaatagtcagttttctagtctgagtaatagataagagactgactaagcaaagtttaaaatgctatttggacactttaatgcacatattggatatctaaaagtctacagccatataaaaattttatataattaatgaggaaatgccgtctctcatgccctaaaataaatcagtagaaacatgtttgctggtgaatcagtgaagcattatgttaaacagtgagttacagctcagagttaaaactttctccttctttttgaagaagctgtgcaaatacttctttttaaggagatctggccttttcctacctggttacctcagtcttcctctgctttgggaagctgaaaaagaagaaaaatcacatttaaagcactggaatgtctgaatgggacgcttgaatgtgtagaacagctgtactgatcctagcatgactcagaggacagtctagggcattttctgggtaattcaggataaaagtattttttttttaagaaaaatacatgtttttggacaacaaaacaaagtaaacattagtttattcgattgcctccttatacttgcctctttcattctgtcccctgtagatttttaaaaaattatctcattttaaaactttattatttcattttaaataattgacatataataattgtacatatttagggggtacatagtcatgtttcaatacatttacagtgatcagatcagggtggttaacgtaatcattggctcaaacatttttcatttctttgtattggtacggagcattcaatatccatcccccttctagctatctaaaactatgtattattgttaactataggcaacatataatggtatagagtgctagaacgtattcctcctaggaataatttgctgtaattttgtatcctttaataaatctctccctatccctctttccccccacccttcccagctgctgtgtcctctgttctaccttctacttccgagataaacttggttttagcttccaaaaaaaaaaaaaa

SEQ ID NO: 150 - DNA, 4521 bp, Homo sapiens; identical to SEQ ID NO: 27

SEQ ID NO: 151 - DNA, 2249 bp, Homo sapiens
cccggatcggggaagtgaaagtgcctcggaggaggagggccggtccggcagtgcagccgcctcacaggtcggcggacgggccaggcgggcggcctcctgaaccgaaccgaatcggctcctcgggccgtcgtcctcccgcccctcctcgcccgccgccggagttttctttcggtttcttccaagattcctggccttccctcgacggagccgggcccagtgcgggggcgcagggcgcgggagctccacctcctcggctttccctgcgtccagaggctggcatggcgcgggccgagtactgagcgcacggtcggggcacagcagggccggtgggtgcagctggctcgcgcctcctctccggccgccgtctcctccggtccccggcgaaagccattgagacaccagctggacgtcacgcgccggagcatgtctgggagtcagagcgaggtggctccatccccgcagagtccgcggagccccgagatgggacgggacttgcggcccgggtcccgcgtgctcctgctcctgcttctgctcctgctggtgtacctgactcagccaggcaatggcaacgagggcagcgtcactggaagttgttattgtggtaaaagaatttcttccgactccccgccatcggttcagttcatgaatcgtctccggaaacacctgagagcttaccatcggtgtctatactacacgaggttccagctcctttcctggagcgtgtgtggaggcaacaaggacccatgggttcaggaattgatgagctgtcttgatctcaaagaatgtggacatgcttactcggggattgtggcccaccagaagcatttacttcctaccagccccccaacttctcaggcctcagagggggcatcttcagatatccacacccctgcccagatgctcctgtccaccttgcagtccactcagcgccccaccctcccagtaggatcactgtcctcggacaaagagctcactcgtcccaatgaaaccaccattcacactgcgggccacagtctggcagttgggcctgaggctggggagaaccagaagcagccggaaaaaaatgctggtcccacagccaggacatcagccacagtgccggtcctgtgcctcctggccatcatcttcatcctcaccgcagccctttcctatgtgctgtgcaagaggaggagggggcagtcaccgcagtcctctccagatctgccggttcattatatacctgtggcacctgactctaatacctgagccaagaatggaagcttgtgaggagacggactctatgttgcccaggctgttatggaactcctgagtcaagtgatcctcccaccttggcctctgaaggtgcgaggattataggcgtcacctaccacatccagcctacacgtatttgttaatatctaacataggactaaccagccactgccctctcttaggcccctcatttaaaaacggttatactataaaatctgcttttcacactgggtgataataacttggacaaattctatgtgtattttgttttgttttgctttgctttgttttgagacggagtctcgctctgtcatccaggctggagtgcagtggcatgatctcggctcactgcaacccccatctcccaggttcaagcgattctcctgcctcctcctaagtagctgggactacaggtgctcaccaccacacccggctaattttttgtatttttagtagagacggggtttcaccatgttgaccaggctggtctcgaactcctgacctggtgatctgcccacccaggcctcccaaagtgctgggattaaaggtgtgagccaccatgcctggccctatgtgtgttttttaactactaaaaattatttttgtaatgattgagtcttctttatggaaacaactggcctcagcccttgcgcccttactgtgattcctggcttcattttttgctgatggttccccctcgtcccaaatctctctcccagtacaccagttgttcctcccccacctcagccctctcctgcatcctcctgtacccgcaacgaaggcctgggctttcccaccctccctccttagcaggtgccgtgctgggacaccatacgggttggtttcacctcctcagtcccttgcctaccccagtgagagtctgatcttgtttttattgttattgcttttattattattgcttttattatcattaaaactctagttcttgttttgtctctcaaaaaaaaaaaaaaaaaaaaaaaaaaaaaaaaaaaaac

SEQ ID NO: 152 - DNA, 939 bp, Homo sapiens
actgagaggagacacaaggagcagcccgcaagcaccaagtgagaggcatgaagttacagtgtgtttccctttggctcctgggtacaatactgatattgtgctcagtagacaaccacggtctcaggagatgtctgatttccacagacatgcaccatatagaagagagtttccaagaaatcaaaagagccatccaagctaaggacaccttcccaaatgtcactatcctgtccacattggagactctgcagatcattaagcccttagatgtgtgctgcgtgaccaagaacctcctggcgttctacgtggacagggtgttcaaggatcatcaggagccaaaccccaaaatcttgagaaaaatcagcagcattgccaactctttcctctacatgcagaaaactctgcggcaatgtcaggaacagaggcagtgtcactgcaggcaggaagccaccaatgccaccagagtcatccatgacaactatgatcagctggaggtccacgctgctgccattaaatccctgggagagctcgacgtctttctagcctggattaataagaatcatgaagtaatgtcctcagcttgatgacaaggaacctgtatagtgatccagggatgaacaccccctgtgcggtttactgtgggagacagcccaccttgaaggggaaggagatggggaaggccccttgcagctgaaagtcccactggctggcctcaggctgtcttattccgcttgaaaatagccaaaaagtctactgtggtatttgtaataaactctatctgctgaaagggcctgcaggccatcctgggagtaaagggctgccttcccatctaatttattgtgaagtcatatagtccatgtctgtgatgtgagccaagtgatatcctgtagtacacattgtactgagtggtttttctgaataaattccatattttacctatga

SEQ ID NO: 153 - DNA, 3925 bp, Homo sapiens
acagcacagacagattgacctattggggtgtttcgcgagtgtgagagggaagcgccgcggcctgtatttctagacctgcccttcgcctggttcgtggcgccttgtgaccccgggcccctgccgcctgcaagtcggaaattgcgctgtgctcctgtgctacggcctgtggctggactgcctgctgctgcccaactggctggcaagatgaagctctccctggtggccgcgatgctgctgctgctcagcgcggcgcgggccgaggaggaggacaagaaggaggacgtgggcacggtggtcggcatcgacctggggaccacctactcctgcgtcggcgtgttcaagaacggccgcgtggagatcatcgccaacgatcagggcaaccgcatcacgccgtcctatgtcgccttcactcctgaaggggaacgtctgattggcgatgccgccaagaaccagctcacctccaaccccgagaacacggtctttgacgccaagcggctcatcggccgcacgtggaatgacccgtctgtgcagcaggacatcaagttcttgccgttcaaggtggttgaaaagaaaactaaaccatacattcaagttgatattggaggtgggcaaacaaagacatttgctcctgaagaaatttctgccatggttctcactaaaatgaaagaaaccgctgaggcttatttgggaaagaaggttacccatgcagttgttactgtaccagcctattttaatgatgcccaacgccaagcaaccaaagacgctggaactattgctggcctaaatgttatgaggatcatcaacgagcctacggcagctgctattgcttatggcctggataagagggagggggagaagaacatcctggtgtttgacctgggtggcggaaccttcgatgtgtctcttctcaccattgacaatggtgtcttcgaagttgtggccactaatggagatactcatctgggtggagaagactttgaccagcgtgtcatggaacacttcatcaaactgtacaaaaagaagacgggcaaagatgtcaggaaagacaatagagctgtgcagaaactccggcgcgaggtagaaaaggccaaacgggccctgtcttctcagcatcaagcaagaattgaaattgagtccttctatgaaggagaagacttttctgagaccctgactcgggccaaatttgaagagctcaacatggatctgttccggtctactatgaagcccgtccagaaagtgttggaagattctgatttgaagaagtctgatattgatgaaattgttcttgttggtggctcgactcgaattccaaagattcagcaactggttaaagagttcttcaatggcaaggaaccatcccgtggcataaacccagatgaagctgtagcgtatggtgctgctgtccaggctggtgtgctctctggtgatcaagatacaggtgacctggtactgcttgatgtatgtccccttacacttggtattgaaactgtgggaggtgtcatgaccaaactgattccaaggaacacagtggtgcctaccaagaagtctcagatcttttctacagcttctgataatcaaccaactgttacaatcaaggtctatgaaggtgaaagacccctgacaaaagacaatcatcttctgggtacatttgatctgactggaattcctcctgctcctcgtggggtcccacagattgaagtcacctttgagatagatgtgaatggtattcttcgagtgacagctgaagacaagggtacagggaacaaaaataagatcacaatcaccaatgaccagaatcgcctgacacctgaagaaatcgaaaggatggttaatgatgctgagaagtttgctgaggaagacaaaaagctcaaggagcgcattgatactagaaatgagttggaaagctatgcctattctctaaagaatcagattggagataaagaaaagctgggaggtaaactttcctctgaagataaggagaccatggaaaaagctgtagaagaaaagattgaatggctggaaagccaccaagatgctgacattgaagacttcaaagctaagaagaaggaactggaagaaattgttcaaccaattatcagcaaactctatggaagtgcaggccctcccccaactggtgaagaggatacagcagaaaaagatgagttgtagacactgatctgctagtgctgtaatattgtaaatactggactcaggaacttttgttaggaaaaaattgaaagaacttaagtctcgaatgtaattggaatcttcacctcagagtggagttgaaactgctatagcctaagcggctgtttactgcttttcattagcagttgctcacatgtctttgggtgggggggagaagaagaattggccatcttaaaaagcaggtaaaaaacctgggttagggtgtgtgttcaccttcaaaatgttctatttaacaactgggtcatgtgcatctggtgtaggaagttttttctaccataagtgacaccaataaatgtttgttatttacactggtctaatgtttgtgagaagcttctaattagatcaattacttattttaggaaatttaagactagatactcgtgtgtggggtgaggggagggagtatttggtatgttgggataaggaaacacttctatttaatgcttccagggattttttttttttttttttaaccctcctgggcccaagtgatccttccacctcagtctcccagctaattgagaccacaggcttgttaccaccatgctcggcttttgcattaatctaagaaaaggggagagaagttaatccacatctttactcaggcaaggggcatttcacagtgcccaagagtggggttttcttgaacatacttggtttcctatttccccttatctttctaaaactgcctttctggtggctttttttaaaattattactaatgatgcttttatagctgcttggattctctgagaaatgatggggagtgagtgatcactggtattaactttatacacttggatttcatttgtaactttaggatgtaaaggtatattgtgaaccctagctgtgtcagaatctccatccctgaaatttctcattagtggtactggggtgggatcttggatggtgacattgaaactacactaaatcccctcactatgaatgggttgttaaaggcaatggtttgtgtcaaaactggtttaggattacttagattgtgttcctgaagaaaagagtccaggtaaatggtatgatcaataaaggacaggctggtgctaacataaaatccaatattgtaatcctagcactttgggaggccaaggcgggtggatcacaaggtcaagagatagagaccatctttgccaacatggtgaaactccatctctactgaaaatacaaaaattagctgggcgtggtagtgcaagctgaaggctgaggcaggagaatcactcgaacccgggaggcagaggttgcagtgagccgagatcacaccactgtactccagcccggcactccagcctggcgacaagagtgagactccacctcaaaaaaaaaaaaaagaatccaatactgcccaaggataggtattttatagatgggcaactggctgaaaggttaattctctagggctagtagaactggatcccaacaccaaactcttaattagacctaggcctcagctgcactgcccgaaaagcatttgggcagaccctgagcagaatactggtctcaggccaagcccaatacagccattaaagatgacctacagtgctgtgtaccctggggcaatagggttaaatggtagttagcaactagggctagtcttcccttacctcaaaggctctcactaccgtggaccacctagtctgtaactctttctgaggagctgttactgaatattaaaaagatagacttcaaaaaaaaaaaaaaaaaa

SEQ ID NO: 154 - DNA, 1816 bp, Homo sapiens
ggcacgaggcgcacgctcgctcgtacggcggccgcggcggcagggcggggccggagcagcgggcggcggcggaggcggcgcccgggagcgctcttcgcttccctcggggtcttgctcggacctcggccaccgcctgggatccccaggactcgtgcgtgcagcatgggcggcgtcggggagccgggaccgcgggagggacccgcgcagccgggggcaccgctgcccaccttctgctgggagcagatccgcgcgcacgaccagcccggcgacaagtggctggtcatcgagcgccgcgtctacgacatcagccgctgggcacagcggcacccagggggcagccgcctcatcggccaccacggcgctgaggacgccacggatgccttccgtgccttccatcaagatctcaattttgtgcgcaagttcctacagcccctgttgattggagagctggctccggaagaacccagccaggatggacccctgaatgcgcagctggtcgaggacttccgagccctgcaccaggcagccgaggacatgaagctgtttgatgccagtcccaccttctttgctttcctactgggccacatcctggccatggaggtgctggcctggctccttatctacctcctgggtcctggctgggtgcccagtgccctggccgccttcatcctggccatctctcaggctcagtcctggtgtctgcagcatgacctgggccatgcctccatcttcaagaagtcctggtggaaccacgtggcccagaagttcgtgatggggcagctaaagggcttctccgcccactggtggaacttccgccacttccagcaccacgccaagcccaacatcttccacaaagacccagacgtgacggtggcgcccgtcttcctcctgggggagtcatccgtcgagtatggcaagaagaaacgcagatacctaccctacaaccagcagcacctgtacttcttcctgatcggcccgccgctgctcaccctggtgaactttgaagtggaaaatctggcgtacatgctggtgtgcatgcagtgggcggatttgctctgggccgccagcttctatgcccgcttcttcttatcctacctccccttctacggcgtccctggggtgctgctcttctttgttgctgtcagggtcctggaaagccactggttcgtgtggatcacacagatgaaccacatccccaaggagatcggccacgagaagcaccgggactgggtcagctctcagctggcagccacctgcaacgtggagccctcacttttcaccaactggttcagcgggcacctcaacttccagatcgagcaccacctcttccccaggatgccgagacacaactacagccgggtggccccgctggtcaagtcgctgtgtgccaagcacggcctcagctacgaagtgaagcccttcctcaccgcgctggtggacatcgtcaggtccctgaagaagtctggtgacatctggctggacgcctacctccatcagtgaaggcaacacccaggcgggcagagaagggctcagggcaccagcaaccaagccagcccccggcgggatcgatacccccacccctccactggccagcctgggggtgccctgcctgccctcctggtactgttgtcttcccctcggccccctcacatgtgtattcagcagccctatggccttggctctgggcctgatgggacaggggtagagggaaggtgagcatagcacattttcctagagcgagaattgggggaaagctgttatttttatattaaaatacattcagatgtaaaaaaaaaaaaaaaaaaaaaaaaaaaaa

SEQ ID NO: 155 - DNA, 4062 bp, Homo sapiens; identical to SEQ ID NO: 38

SEQ ID NO: 156 - DNA, 3380 bp, Homo sapiens
gcgcgccggcctgagagccctgtggacaacctcgtcattgtcaggcacagagcggtagaccctgcttctctaagtgggcagcggacagcggcacgcacatttcacctgtcccgcagacaacagcaccatctgcttgggagaaccctctcccttctctgagaaagaaagatgtcgaatgggtattccacagacgagaatttccgctatctcatctcgtgcttcagggccagggtgaaaatgtacatccaggtggagcctgtgctggactacctgacctttctgcctgcagaggtgaaggagcagattcagaggacagtcgccacctccgggaacatgcaggcagttgaactgctgctgagcaccttggagaagggagtctggcaccttggttggactcgggaattcgtggaggccctccggagaaccggcagccctctggccgcccgctacatgaaccctgagctcacggacttgccctctccatcgtttgagaacgctcatgatgaatatctccaactgctgaacctccttcagcccactctggtggacaagcttctagttagagacgtcttggataagtgcatggaggaggaactgttgacaattgaagacagaaaccggattgctgctgcagaaaacaatggaaatgaatcaggtgtaagagagctactaaaaaggattgtgcagaaagaaaactggttctctgcatttctgaatgttcttcgtcaaacaggaaacaatgaacttgtccaagagttaacaggctctgattgctcagaaagcaatgcagagattgagaatttatcacaagttgatggtcctcaagtggaagagcaacttctttcaaccacagttcagccaaatctggagaaggaggtctggggcatggagaataactcatcagaatcatcttttgcagattcttctgtagtttcagaatcagacacaagtttggcagaaggaagtgtcagctgcttagatgaaagtcttggacataacagcaacatgggcagtgattcaggcaccatgggaagtgattcagatgaagagaatgtggcagcaagagcatccccggagccagaactccagctcaggccttaccaaatggaagttgcccagccagccttggaagggaagaatatcatcatctgcctccctacagggagtggaaaaaccagagtggctgtttacattgccaaggatcacttagacaagaagaaaaaagcatctgagcctggaaaagttatagttcttgtcaataaggtactgctagttgaacagctcttccgcaaggagttccaaccatttttgaagaaatggtatcgtgttattggattaagtggtgatacccaactgaaaatatcatttccagaagttgtcaagtcctgtgatattattatcagtacagctcaaatccttgaaaactccctcttaaacttggaaaatggagaagatgctggtgttcaattgtcagacttttccctcattatcattgatgaatgtcatcacaccaacaaagaagcagtgtataataacatcatgaggcattatttgatgcagaagttgaaaaacaatagactcaagaaagaaaacaaaccagtgattccccttcctcagatactgggactaacagcttcacctggtgttggaggggccacgaagcaagccaaagctgaagaacacattttaaaactatgtgccaatcttgatgcatttactattaaaactgttaaagaaaaccttgatcaactgaaaaaccaaatacaggagccatgcaagaagtttgccattgcagatgcaaccagagaagatccatttaaagagaaacttctagaaataatgacaaggattcaaacttattgtcaaatgagtccaatgtcagattttggaactcaaccctatgaacaatgggccattcaaatggaaaaaaaagctgcaaaaaaaggaaatcgcaaagaacgtgtttgtgcagaacatttgaggaagtacaatgaggccctacaaattaatgacacaattcgaatgatagatgcgtatactcatcttgaaactttctataatgaagagaaagataagaagtttgcagtcatagaagatgatagtgatgagggtggtgatgatgagtattgtgatggtgatgaagatgaggatgatttaaagaaacctttgaaactggatgaaacagatagatttctcatgactttattttttgaaaacaataaaatgttgaaaaggctggctgaaaacccagaatatgaaaatgaaaagctgaccaaattaagaaataccataatggagcaatatactaggactgaggaatcagcacgaggaataatctttacaaaaacacgacagagtgcatatgcgctttcccagtggattactgaaaatgaaaaatttgctgaagtaggagtcaaagcccaccatctgattggagctggacacagcagtgagttcaaacccatgacacagaatgaacaaaaagaagtcattagtaaatttcgcactggaaaaatcaatctgcttatcgctaccacagtggcagaagaaggtctggatattaaagaatgtaacattgttatccgttatggtctcgtcaccaatgaaatagccatggtccaggcccgtggtcgagccagagctgatgagagcacctacgtcctggttgctcacagtggttcaggagttatcgaacatgagacagttaatgatttccgagagaagatgatgtataaagctatacattgtgttcaaaatatgaaaccagaggagtatgctcataagattttggaattacagatgcaaagtataatggaaaagaaaatgaaaaccaagagaaatattgccaagcattacaagaataacccatcactaataactttcctttgcaaaaactgcagtgtgctagcctgttctggggaagatatccatgtaattgagaaaatgcatcacgtcaatatgaccccagaattcaaggaactttacattgtaagagaaaacaaagcactgcaaaagaagtgtgccgactatcaaataaatggtgaaatcatctgcaaatgtggccaggcttggggaacaatgatggtgcacaaaggcttagatttgccttgtctcaaaataaggaattttgtagtggttttcaaaaataattcaacaaagaaacaatacaaaaagtgggtagaattacctatcacatttcccaatcttgactattcagaatgctgtttatttagtgatgaggattagcacttgattgaagattcttttaaaatactatcagttaaacatttaatatgattatgattaatgtattcattatgctacagaactgacataagaatcaataaaatgattgttttactctgaaaaaaaaaaaaaaa

SEQ ID NO: 157 - DNA, 4220 bp, Homo sapiens
gagtgcgttcgcggctgctttgacctggtgggcgccgcctccggcactgcaccgaggcggggcgccagcgcccaggttgctgggctggccttggcgcccccttcccctacccagagcgcaggcaggcaggggggtcccgccgcgccccttcagcatatgccggtgcagctgacgacagccctgcgtgtggtgggcaccagcctgtttgccctggcagtgctgggtggcatcctggcagcctatgtgacgggctaccagttcatccacacggaaaagcactacctgtccttcggcctgtacggcgccatcctgggcctgcacctgctcattcagagcctttttgccttcctggagcaccggcgcatgcgacgtgccggccaggccctgaagctgccctccccgcggcggggctcggtggcactgtgcattgccgcataccaggaggaccctgactacttgcgcaagtgcctgcgctcggcccagcgcatctccttccctgacctcaaggtggtcatggtggtggatggcaaccgccaggaggacgcctacatgctggacatcttccacgaggtgctgggcggcaccgagcaggccggcttctttgtgtggcgcagcaacttccatgaggcaggcgagggtgagacggaggccagcctgcaggagggcatggaccgtgtgcgggatgtggtgcgggccagcaccttctcgtgcatcatgcagaagtggggaggcaagcgcgaggtcatgtacacggccttcaaggccctcggcgattcggtggactacatccaggtgtgcgactctgacactgtgctggatccagcctgcaccatcgagatgcttcgagtcctggaggaggatccccaagtagggggagtcgggggagatgtccagatcctcaacaagtacgactcatggatttccttcctgagcagcgtgcggtactggatggccttcaacgtggagcgggcctgccagtcctactttggctgtgtgcagtgtattagtgggcccttgggcatgtaccgcaacagcctcctccagcagttcctggaggactggtaccatcagaagttcctaggcagcaagtgcagcttcggggatgaccggcacctcaccaaccgagtcctgagccttggctaccgaactaagtataccgcgcgctccaagtgcctcacagagacccccactaagtacctccggtggctcaaccagcaaacccgctggagcaagtcttacttccgggagtggctctacaactctctgtggttccataagcaccacctctggatgacctacgagtcagtggtcacgggtttcttccccttcttcctcattgccacggttatacagcttttctaccggggccgcatctggaacattctcctcttcctgctgacggtgcagctggtgggcattatcaaggccacctacgcctgcttccttcggggcaatgcagagatgatcttcatgtccctctactccctcctctatatgtccagccttctgccggccaagatctttgccattgctaccatcaacaaatctggctggggcacctctggccgaaaaaccattgtggtgaacttcattggcctcattcctgtgtccatctgggtggcagttctcctgggagggctggcctacacagcttattgccaggacctgttcagtgagacagagctagccttccttgtctctggggctatactgtatggctgctactgggtggccctcctcatgctatatctggccatcatcgcccggcgatgtgggaagaagccggagcagtacagcttggcttttgctgaggtgtgacatggcccccaagcagagcgggtaaagtgcaatgggtaagggagggaaggggaatggaagagaaaagacagggtgggagggaggagggagtgctgtgttttagtctcttaatggtccaaaggacaaatctaaaatgcaaagaacggtgatgtagtatggcctgacagctctgtttagaggaggcaacactgatcccccagatgcagggctgcaggggattctgtgttttcagactgcctgtctgcttgcatctgcacataggcagtagcctcctcctgggctccagagggcactcagaagttgtgctaaaccaagttaagtcccattcagtggcaacttgtgataggtacctgagtgacggcaacctgcggaaggaggttctcccagcccatctgaacacaaccagaggtggcaggagaatttctactgagcgagctgggccggttagtgtatgtcacccccaccccacccctaagtagtcatcaatgcaataagattgcgcctgagatacaaggcccagaagcctgatctttgggcatcagaaaacagggtccaggaatggtgctttatgtgagataccccactccacatcaacattccagggatgagccaaaccagcagggagttagcactgaactgcttttaaaagtgcacattaaaaaggaaagtttgccaggaggaacaaagagattgtggtggtgctaaaggaggccataagctacacagaggccttgggtgttccacctggaaactgctcagacgtctagatgggttcttagcttgtctgtgatctctgctggggagataaaaagattaagccccaacatgttcagaaaagaagtgaagtcttgggtattttaacctgtatactcttgaattcctctcaaattcagctctgatctgaggctaagacacactccccacttcactttcttcaaagccacattttttgaggtatcactgcagtcacctcttctaccctcatcatcataggtaaggttttcaaggtggcaattggggcggagccccggctcttatagaagcttcagcaggaggcaagcgtgttctcagcacatatgggaactatgaggagcctctgatcaaattggctacaatcttggagctgcttggacggattccttggcagccgggttagcatgtgtgactttcaggctactgttcttgacaatcatctccaatggaaagcttttcagtgttcccaaagtgaactctcaaatccaaaatggttatctttgagaccatccattctcctcagtggcttctccagggaattcttacagccaagttgtgacagtcactgcatttgcctgcttctttccagaaaccaaactaggagatgaaactggttcctacatcctaaggttcttgctttctctctcatgcctcctgaggctgtttttggctgttttccctctgctgcttttggggaatgaggggaagccattttccagtgacttgcaatccaggctgttctcagcgttttgagtttaaaacctgggatcctgactaagcctttgacttaagggttgcttgcttgccctccaaatgtcctttctcagaggggccagctaacccgtgcagaaccagcactaaggtggacagcagacaagagggcaagcctctagtgtaccaagtgcttcctacaaagacgcaaggtgtgctctgagccacagatgggcaaaccctggtgctttccttcatctcccacgaactcaagggttttccaggtgtagctaacagttgccacatcacacagacctcgagtttctggtaagactgctggttgacatcagacccaacccatgaaggctggaaggcagcaggcatttgctaaggcagctgatccaggcaatcgttctgctggccaagaagttaaactattttgagcattagaatggaggaaatccggtcagccaagtgcagagttcagacttcgctaagggcttgtttttcttcagcatttacttgaagattaatgtaggatgacaggctctcctggctgtcctaccatcagctctgccttgcactgtggtcgtcaactttcctcaaatcaaaaacaggcaggtacaggtagtgggctcacaacgtttgacctcgactggtttttctaagttattttgtacatttttcagcagcaaaaccaaactgggtcttcagctttatccccgtttcttgcaagggaagagcctttatacaattggacgcattttggtttttcctcattgagaattcaaatcctcttttgtattgtttctacaataatttgtaaacatatttatttttacctgcttttttttttttttttaattttcaggtcaagttttttatactgcacttatttgtcaaaataaagattctcacatatgccggttatctcgaaa

SEQ ID NO: 158 - DNA, 1229 bp, Homo sapiens
ggaggggcatggagccgccgcgggcctgctgagctccggagcgcggcagccggcggcacgatgccggtgcagctgacgacagccctgcgtgtggtgggcaccagcctgtttgccctggcagtgctgggtggcatcctggcagcctatgtgacgggctaccagttcatccacacggaaaagcactacctgtccttcggcctgtacggcgccatcctgggcctgcacctgctcattcagagcctttttgccttcctggagcaccggcgcatgcgacgtgccggccaggccctgaagctgccctccccgcggcggggctcggtggcactgtgcattgccgcataccaggaggaccctgactacttgcgcaagtgcctgcgctcggcccagcgcatctccttccctgacctcaaggtggtcatggtggtggatggcaaccgccaggaggacgcctacatgctggacatcttccacgaggtgctgggcggcaccgagcaggccggcttctttgtgtggcgcagcaacttccatgaggcaggcgagggtgagacggaggccagcctgcaggagggcatggaccgtgtgcgggatgtggtgcgggccagcaccttctcgtgcatcatgcagaagtggggaggcaagcgcgaggtcatgtacacggccttcaaggccctcggcgattcggtggactacatccaggtgtgcgactctgacactgtgctggatccagcctgcaccatcgagatgcttcgagtcctggaggaggatccccaagtagggggagtcgggggagatgtccagcccccagggaaaggtatggcagtagaggatgaccaggtccaagctgcccaggtcagagctacggaagcatggtccgttcaccaacgccacgtttctagagagcagtgagctgattctccaatggtgagcaggggactacatgtgaactgggacctgcaggccaatgtatccctgaggaaaagtccacaagaacaattcaagaaactagtaagaaacaatgggcagaaagctgtgggacgaaagcacagcaggcttctgggaggctggagatcctttctctcaagggcaggattattcccacctgccacagttcacatgccacaaataacatctcaccttcagtcaagaaaaacgcaaaggaaaaaaaaaaaaaaaaaaaaaaaaaaaaaaaaaaaaaaaaaaaaaaaaaaaaaaaaaaaaaaaaaaaaaaa

SEQ ID NO: 159 - DNA, 625 bp, Homo sapiens
cgcagccaggagccatgggcaacatctcctctaacatctcggccttccagtccctgcatatcgtcatgttgggcttggactcggccggcaagaccacggtgctctaccggctcaagttcaacgagttcgtgaacacggtgcccaccatcggcttcaacaccgagaagatcaagctgagcaacggcacggccaagggcatcagctgccacttctgggacgtgggcggccaggagaagctgcggccgctgtggaagtcctacagccgctgcacggacggcatcatctacgtggtggactcggtggacgtggaccggctggaggaggccaagacggagctgcacaaggtgaccaagttcgccgagaaccagggcacgccgctgctggtcatcgccaacaagcaggacctgcccaagtcgctgccggtggcagagattgagaagcagctggcgctgcacgagcttatcccggccaccacctatcacgtccagccggcgtgcgccatcatcggcgagggcctcaccgagggcatggacaagctctatgagatgatcctgaaacgcaggaagtccctcaagcagaagaagaagcggtaatgcgcccggagcgaccggggagcgagcgagtg

SEQ ID NO: 160 - DNA, 3065 bp, Homo sapiens
tagttattaaagttcctatgcagctccgcctccgtccggcctcatttcctcaaaaaatccctgctttccccgctcgccacgccctcctgctacccggctttaaagctagtgaggcacagcctgcggggaacgtagctagctgcaagcagaggccggcatgaccaccgagcagcgacgcagcctgcaagccttccaggattatatccggaagaccctggaccctacctacatcctgagctacatggccccctggtttagggaggaagaggtgcagtatattcaggctgagaaaaacaacaagggcccaatggaggctgccacactttttctcaagttcctgttggagctccaggaggaaggctggttccgtggctttttggatgccctagaccatgcaggttattctggactttatgaagccattgaaagttgggatttcaaaaaaattgaaaagttggaggagtatagattacttttaaaacgtttacaaccagaatttaaaaccagaattatcccaaccgatatcatttctgatctgtctgaatgtttaattaatcaggaatgtgaagaaattctacagatttgctctactaaggggatgatggcaggtgcagagaaattggtggaatgccttctcagatcagacaaggaaaactggcccaaaactttgaaacttgctttggagaaagaaaggaacaagttcagtgaactgtggattgtagagaaaggtataaaagatgttgaaacagaagatcttgaggataagatggaaacttctgacatacagattttctaccaagaagatccagaatgccagaatcttagtgagaattcatgtccaccttcagaagtgtctgatacaaacttgtacagcccatttaaaccaagaaattaccaattagagcttgctttgcctgctatgaaaggaaaaaacacaataatatgtgctcctacaggttgtggaaaaacctttgtttcactgcttatatgtgaacatcatcttaaaaaattcccacaaggacaaaaggggaaagttgtcttttttgcgaatcagatcccagtgtatgaacagcagaaatctgtattctcaaaatactttgaaagacatgggtatagagttacaggcatttctggagcaacagctgagaatgtcccagtggaacagattgttgagaacaatgacatcatcattttaactccacagattcttgtgaacaaccttaaaaagggaacgattccatcactatccatctttactttgatgatatttgatgaatgccacaacactagtaaacaacacccgtacaatatgatcatgtttaattatctagatcagaaacttggaggatcttcaggcccactgccccaggtcattgggctgactgcctcggttggtgttggggatgccaaaaacacagatgaagccttggattatatctgcaagctgtgtgcttctcttgatgcgtcagtgatagcaacagtcaaacacaatctggaggaactggagcaagttgtttataagccccagaagtttttcaggaaagtggaatcacggattagcgacaaatttaaatacatcatagctcagctgatgagggacacagagagtctggcaaagagaatctgcaaagacctcgaaaacttatctcaaattcaaaatagggaatttggaacacagaaatatgaacaatggattgttacagttcagaaagcatgcatggtgttccagatgccagacaaagatgaagagagcaggatttgtaaagccctgtttttatacacttcacatttgcggaaatataatgatgccctcattatcagtgagcatgcacgaatgaaagatgctctggattacttgaaagacttcttcagcaatgtccgagcagcaggattcgaagagattgagcaagatcttactcagagatttgaagaaaagctgcaggaactagaaagtgtttccagggatcccagcaatgagaatcctaaacttgaagacctctgcttcatcttacaagaagagtaccacttaaacccagagacaataacaattctctttgtgaaaaccagagcacttgtggacgctttaaaaaattggattgaaggaaatcctaaactcagttttctaaaacctggcatattgactggacgtggcaaaacaaatcagaacacaggaatgaccctcccggcacagaagtgtatattggatgcattcaaagccagtggagatcacaatattctgattgccacctcagttgctgatgaaggcattgacattgcacagtgcaatcttgtcatcctttatgagtatgtgggcaatgtcatcaaaatgatccaaaccagaggcagaggaagagcaagaggtagcaagtgcttccttctgactagtaatgctggtgtaattgaaaaagaacaaataaacatgtacaaagaaaaaatgatgaatgactctattttacgccttcagacatgggacgaagcagtatttagggaaaagattctgcatatacagactcatgaaaaattcatcagagatagtcaagaaaaaccaaaacctgtccctgataaggaaaataaaaaactgctctgcagaaagtgcaaagccttggcatgttacacagctgacgtaagagtgatagaggaatgccattacactgtgcttggagatgcttttaaggaatgctttgtgagtagaccacatcccaagccaaagcagttttcaagttttgaaaaaagagcaaagatattctgtgcccgacagaactgcagccatgactggggaatccatgtgaagtacaagacatttgagattccagttataaaaattgaaagttttgtggtggaggatattgcaactggagttcagacactgtactcgaagtggaaggactttcattttgagaagataccatttgatccagcagaaatgtccaaatgatatcaggtcctcaatcttcagctacagggaatgagtaactttgagtggagaagaaacaaacatagtgggtataatcatggatcgcttgtacccctgtgaaaatatattttttaaaaataaaaaaaaaaaa

SEQ ID NO: 161 - DNA, 582 bp, Homo sapiens
  misc_feature (493)..(493): "n" = a, t, g, or c.
  misc_feature (507)..(507): "n" = a, t, g, or c.
  misc_feature (513)..(513): "n" = a, t, g, or c.
  misc_feature (536)..(536): "n" = a, t, g, or c.
  misc_feature (543)..(543): "n" = a, t, g, or c.
  misc_feature (555)..(555): "n" = a, t, g, or c.
  misc_feature (573)..(573): "n" = a, t, g, or c.
gtatctacgcattttctaaatttccttcaataatcatagattacattggtaataaagaaacataaacatttcttaagggttgcttaaaatgagcgttgcctgtaaagtgatccttctccaccttaggtgaaaaataagctctgcttttccttcccctgcctcatgctccatcccctgtccccatgtgaagaggctgccccacggcttcctcgtccttctttcttcatccactatctaagtcccagcagccgccctcttagctgtcaagtccatccccatctcctccagctcctccatgctccaacagcactttagagaaggcagaggggccaagcacgtgggttttctttggccttccctgagcaaacaagcccggagagaagaagctgggtgttgataggagagagggctctcttaattggcaaattaggataaagcccaaaatggtaaaaagcattattcacatttatcaaacatctcatagatgtggganctatggggatttcnaaaaanccttcatagatttttgcctcccnaaaccanaaagcagccccngaggtagacgtcattttngttcccttt

SEQ ID NO: 162 - DNA, 3052 bp, Homo sapiens
ggatgaaaacatccccagcatggagatgtgtgaccagagacacaatatcaccatgtgcccgctttgcgacaagacctgcagctactggaagatgagctcagcctgcgccacggcccgcgccagccacctcttcgacaaccccgccacggtcttcttctctgtcttcatggccctctgggctgccaccttcatggagcactggaagcggaaacagatgcgactcaactaccgctgggacctcacgggctttgaagaggaagaggaggctgtcaaggatcatcctagagctgaatacgaagccagagtcttggagaagtctctgaagaaagagtccagaaacaaagagactgacaaagtgaagctgacatggagagatcggttcccagcctacctcactaacttggtctccatcatcttcatgattgcagtgacgtttgccatcgtcctcggcgtcatcatctacaggatctccatggccgccgccttggccatgaactcctccccctccgtgcggtccaacatccgggtcacagtcacagccaccgcggtcatcatcaacctagtggtcatcatcctcctggacgaggtgtatggctgcatagcccgatggctcaccaagatcgaggtcccaaagacggagaaaagctttgaggagaggctgatcttcaaggctttcctgctgaagtttgtgaattcctacacccccatcttttacgtggcgttcttcaaaggccggtttgttggacgcccgggcgactacgtgtacattttccgttccttccgaatggaagagtgtgcgccagggggctgcctgatggagctatgcatccagctcagcatcatcatgctggggaaacagctgatccagaacaacctgttcgagatcggcatcccgaagatgaagaagctcatccgctacctgaagctgaagcagcagagcccccctgaccacgaggagtgtgtgaagaggaaacagcggtacgaggtggattacaacctggagcccttcgcgggcctcaccccagagtacatggaaatgatcatccagtttggcttcgtcaccctgtttgtcgcctccttccccctggccccactgtttgcgctgctgaacaacatcatcgagatccgcctggacgccaaaaagtttgtcactgagctccgaaggccggtagctgtcagagccaaagacatcggaatctggtacaatatcctcagaggcattgggaagcttgctgtcatcatcaatgccttcgtgatctccttcacgtctgacttcatcccgcgcctggtgtacctctacatgtacagtaagaacgggaccatgcacggcttcgtcaaccacaccctctcctccttcaacgtcagtgacttccagaacggcacggcccccaatgaccccctggacctgggctacgaggtgcagatctgcaggtataaagactaccgagagccgccgtggtcggaaaacaagtacgacatctccaaggacttctgggccgtcctggcagcccggctggcgtttgtcatcgtcttccagaacctggtcatgttcatgagcgactttgtggactgggtcatcccggacatccccaaggacatcagccagcagatccacaaggagaaggtgctcatggtggagctgttcatgcgggaggagcaagacaagcagcagctgctggaaacctggatggagaaggagcggcagaaggacgagccgccgtgcaaccaccacaacaccaaagcctgcccagacagcctcggcagcccagcccccagccatgcctaccacgggggcgtcctgtagctatgccagcggggctgggcaggccagccgggcatcctgaccgatgggcaccctctcccagggcaggcggcttcccgctcccaccagggcccggtgggtcctgggttttctgcaaacatggaggaccactttctgataggacattttcctttcttctttctgttttctttcccttgtttttgcacaaagccattatgcagggaatattttttaatctgtagtattcaagatgaatcaaaatgatggctggtaatacggcaataaggtagcaaaggcaggtgctttgcagaaagaatgcttggaaacttgagtctccctagaggtgaaaagtgagcagaggcccctagaaaccctcctctgaatcctcctaattccttaagatagatgcaaaatggtaagccgaggcatcgcgcaaaagctggtgcgatgcttcagggaaaatggaaaacccacgcaagaataatgattgattccggttccaaaaggtgtcacctacctgtttcagaaaagttagactttccatcgccttttccttccatcagttgagtggctgagagagaagtgcctcatccctgagccacacagggggcgtgggagcatcccagttatccctggaaagctagaaggggacagaggtgtccctgattaagcaggaaacagcacccttggcgtccccagcaggctccccactgtcagccacacacctgcccccatcacaccaagccgacctcagagttgttcatcttccttatgggacaaaaccggttgaccagaaaatgggcagagagagatgacctcggaagcatttccacagatggtgtcagggtttcaagaagtcttagggcttccaggggtcccctggaagctttagaatatttatgggtttttttttcaaatatcaattatatggtagattgaggattttttttctgtagctcaaaggtggagggagtttattagttaaccaaatatcgttgagaggaatttaaaatactgttactaccaaagatttttattaataaaggcttatattttggtaacacttctctatatttttactcacaggaatgtcactgttggacaattattttaaaagtgtataaaaccaagtctcataaatgatatgagtgatctaaatttgcagcaatgatactaaacaactctctgaaatttctcaagcaccaagagaaacatcattttagcaaaggccaggaggaaaaatagaaataaatttgtcttgaagatctc

SEQ ID NO: 163 - DNA, 1623 bp, Homo sapiens
gctggtttctgggggtcgtggccttgctcccgctgtgcgggaaaagaatccaggcccttccacgcgcgtgtgggtgcgggggccccgaagtgctcgtggttccccgctaggtctccgctggggcaggaaccggaatcatgggtgggaccaccagcacccgccgggtcaccttcgaggcggacgagaatgagaacatcaccgtggtgaagggcatccggctttcggaaaatgtgattgatcgaatgaaggaatcctctccatctggttcgaagtctcagcggtattctggtgcttatggtgcctcagtttctgatgaagaattgaaaagaagagtagctgaggagctggcattggagcaagccaagaaagaatccgaagatcagaaacgactaaagcaagccaaagagctggaccgagagagggctgctgccaatgagcagttaaccagagccatccttcgggagaggatatgtagcgaggaggaacgcgctaaggcaaagcacctggctaggcagctggaagagaaagaccgagtgctaaagaagcaggatgcattctacaaagaacagctggctagactggaggagaggagctcagagttctacagagtcaccactgaacaatatcagaaagctgctgaagaggtggaagcaaagttcaagcgatatgagtctcatccagtctgtgctgatctgcaggccaaaattcttcagtgttaccgtgagaacacccaccagaccctcaaatgctccgctctggccacccagtatatgcactgtgtcaatcatgccaaacagagcatgcttgagaagggaggataaaaactttcagaatgagcaaaacaccatcaacgttaattccagagatggaacattttttttcctagtgagaaaacaacccatttgaagagaagaccactaatgagaagaccactaaagagagacatcaagaatggattcagcagaatcatttcacgttttgaacagcagcagtttgaagggccaaagccttgatcagggatcagtcattaaaggacactcttgagtattagtaaaccctcttatgatgattaaaagagaagggcagccctctccaccttttggtactttctattcaacttgcactgaccataaaatgtttctcttctgaacaagccccatcatttggtgaacctccaccctaacaaagtaggatggggttgggggctaaattaattggagtggggcgaggagagagccagaaaacatagatccgagggcagcagtgctgggtggagagagccagaaaacagatctggaggcagcagtgctggatggaattgtctaggctgtggcatgttggttttgtctttcttttctcctttgattatgtaagagctatttcattataacttattatggtgattatacaggcaagaagacaaaaaggagagaaaatgtacctcttctactggaataatgtttatgattacaagtgagataaggtatttttatcaatatgaaggcaaccttggctgataaaacctctatagtgaatactcacatctttacttcactcactatcaataataaatatattttctgacaaagactggcaaaaaaaaaaaaaaaaaaaaaaaaaaaa

SEQ ID NO: 164 - DNA, 2303 bp, Homo sapiens
aaaaattactatgaagtacttggagttacgaaagatgctggtgatgaagatttgaaaaaagcttatagaaagcttgctttgaagtttcatccagacaaaaaccatgcacttggagcaacagatgcttttaaaaagattggaaatgcttatgctgttttaagtaatccagaaaagcgaaaacagtatgacctcacgggcaatgaagaacaagcatgtaaccaccaaaacaatggcagatttaatttccattgaggttgtgaagctgatataactccagaagacttgtttaatatattttttgggggtggatttccttcaggtagtgtacattctttttcaaatggaagagctggttatagccaacaacatcagcatcgacatagtggacatgaaagagaagaggaaagaggagatggaggtttttctgtgtttatccagctgatgcccataattgtattgatcctcgtgtcattattaagccagttgatggtctctaatcctccttattccttatatcccagatctggaactgggcaaactattaaaatgcaaacagaaaacttgggtgttgtttattatgtcaacaaggacttcaaaaatgaatataaaggaatgttattacaaaaggtagaaaagagtgtggaggaagattatgtgactaatattcgaaataactgctggaaagaaagacaacaaaaaacagatatgcagtatgcagcaaaagtataccgtgatgatcgactccgaaggaaggcagatgccttgagcatggacaactgtaaagaattagagcggcttaccagtctttataaaggaggatgaactggaatttttatttataccttttagcgtactctttattttttctgtaagtaagtttggtttcatcatgagggatgaaggaaaagatttgatactgaaaactaaactgaatagttggttcctgaaatcttggactgtttatgacctactggctcctttaaatagtaactgaaaactaaaatggaatattttagttaacgcttctacaagtattttcattttaaaagcttacatgattcctaactaaagtgtcatgagaaaggattatcacacctgtagcaatttccagttttagtgattctccattttttcccttgtcatgtaaatatttatggaatgatcattttgtgtacatacaggttactgcttttttatttaaattcttttagtgtttagctccatgagacacttcagtttaaattgatggaataaatgttatatgacacatttacattttccttatcaaggtgtcaaatatgtggactttaaacaatgaaactttttcagaaagaaaaaacaaaaactttaactttgtgtaaaatcttatagtattatcagcttagagggaattgatatttttaatattgccgttatattccaaaatatatattgagataaatgaactggtgtagaatatcagtttgctatttagttttatgaattactatacatatacatgcatagaaatgaaatgctatactgataaattttaaagaaaatatgaggaaatggctataaatattaaactaaaagggtcttcaacagtaaagtgcagttatgtcatttaaaattccaatactttaaaggccaccaaattttgatgtatatgtccttgaagggctgctaaaatttatgaagaggactcacattttcccccatagaaatttgcagtttcttggtgatcatttaagcaggatccaaagaagttcctttacaaataagtaataagaaaaatgagtactaaaatacagctttgtgccttttaaccctatgccaactcctaaacatataagtagattacagtatacttatctgatcagagcatgatctgtttggccacatgcaagtgtgagcagaaatagagcagcacgtagaatagtaacttaaagcaagtcatcctttaaaaattctgagctaaaatctatttaccattgagtaattgaattaatcccataggaataagctccttgtaagtaaatccatgatatgaattagaaaaaaaaaacagctggaaattgaagtttttgatgcctgtatactggatatgaaactatttgatttctagtcttctgtgtttagcagttgtaatattttaatgattttgcttcatactcggttaatggaacataaacatatctttgatacttctttgtgagtgagagaatgctagatagggtggctttgttctttgtttaagttttttttcctgaatgtagttaatttatggcatctgttgaataaaactgctaaaatgacctctt

SEQ ID NO: 165 - DNA, 3471 bp, Homo sapiens
gtgagccgtctacgaagcccgggcttggcctgggcgacactgagcggctttaaccggcggcgtccagccggctccgccagcgctgccgccgccctcgaggctccctctgactgaaggcgcgctgagcatcgcggcattaggggctcctggtccctcaaacatccagggaagccattttcagggactaggtactgacccccgcgagccgccacagccacagcccgcgctccgggccgaacgcccgagctcaagagctcccgagcttccgtcgggcggcggcctcacagctgggggccctgaggcggaaggcgcagccgctcagctgcggaccgggggcgtggcgagggcgcacaggttctgtttttcgccggcccggggccgctttcggtttcgtttcccgccggcgtctccaccctgcgagagccgcccgccagccagcgtccgccgccgtccgcgtcgcgccacccgcggtccgacgggagcaggcccagcggccatggcccaggccggcgtcgtcggtgaggtcacccaggtgctgtgcgcggccgggggcgccctggagttgcccgagctgcggcgccgcttgcggatgggcttgagcgccgacgcgctggagcggctgctgcggcagcgtgggcgcttcgtggtggcggtgcgggcgggcggcgcagccgcggccccggagcgcgtggtgctggccgcctcgccgctgcgcctgtgtcgcgcgcaccagggctccaagccgggctgcgtggggctctgcgcgcagctccacctctgcaggttcatggtctacggcgcctgcaagttcctgagagccgggaagaactgtaggaatagtcacagcttgacaaccgaacacaacctgagtgtgctgagaactcatggcgttgaccacctgagctataatgagctatgccaactcttgtttcagaacgacccctggcttttgccagaaatttgccaacattacaacaaaggagatggaccccacggctcttgtgcctttcaaaagcagtgcatcaagctccatatctgccagtattttttacagggggaatgcaagtttggcactagctgtaagagatcccatgatttctctaattctgagaatctggaaaaattggagaagttgggtatgagctcagacctggtgagcaggctgcctaccatttatagaaatgcacatgacatcaagaataagagctctgcccccagcagagtgcctcctctttttgtcccacaggggacttctgaaagaaaagacagttcaggttctgtgtccccaaacactcttagccaggaggagggtgatcagatctgtttgtaccatatccggaaaagttgtagctttcaagataagtgccatagagttcatttccatttgccgtatcgatggcaattcttggatagaggcaaatgggaggatttggacaacatggaacttattgaagaggcatattgcaatcccaaaatagaaaggatcctgtgctctgagtcagccagtacctttcactctcattgtctgaactttaacgccatgacttacggtgctacccaggctcgccgcctctccacggcctcctctgtcaccaaacctccacacttcatcctcaccactgactggatttggtactggagtgatgagtttggttcttggcaggaatatggaagacagggcacggtgcaccctgtgaccactgtcagcagtagcgacgtggagaaggcctacctggcctactgtacaccggggtctgacggccaggcagccaccttgaagttccaggccggaaagcacaactacgagttagatttcaaagccttcgttcagaaaaacctggtctatggcacaactaaaaaggtttgccgcagacccaaatacgtgtctccccaggatgtgacgaccatgcaaacctgcaataccaagtttccaggcccgaagagcatcccagactattgggactcctctgccctgccagacccaggctttcagaagatcacccttagttcttcctcggaagagtatcagaaggtctggaacctctttaaccgcacgctgcctttttactttgttcagaagattgagcgagtacagaacctggccctctgggaagtctaccagtggcaaaaaggacagatgcagaagcagaacggagggaaggccgtggacgagcggcagctgttccacggcaccagcgccatttttgtggacgccatctgccagcagaactttgactggcgggtctgtggtgttcatggcacttcctacggcaaggggagctactttgcccgagatgctgcatattcccaccactacagcaaatccgacacgcagacccacacgatgttcctggcccgggtgctggtgggcgagttcgtcaggggcaatgcctcctttgtccgtccaccggccaaggagggctggagcaacgccttctatgatagctgcgtgaacagtgtgtccgacccctccatctttgtgatctttgagaaacaccaggtctacccagagtatgtcatccagtacaccacctcctccaagccctcggtcacaccctccatcctgctggccttgggctccctgttcagcagccgacagtgagtgcacaggagtgttccaggcctttcacctgctctgccttgaaatggctatttgggcctttccttttctttttaaacagaaacttttaatgaactgttctcttaacattgacctctcaatgaagttatgttcttaatctcttgctaataatgatttttacttttaagtcacttttgggttcactagtggactaaccagaagtgattgtagttgagtccagttttgctttttaataatgtgttgaagttttagtttttactctttgttgactttgctgcttattggcaccagggacagagtttctagatacaattttatggattggttttaatttttatgagtttgtctctgcagtgattcggtttctcagagtctcatggcatcatagtttttccagaatgacacagtagccaccggtggatgacagcccacgggcggcacagtcacttctgcctgttgctctgacaccaacccaggcagctctgctgtggcttctcctgggctctggcattagttggtctgtgtcacattgtcagaacaggtggctgctgtgtggtgccatcgagtccctgctggttccccttgtcctgggagggtcacccattgcccaaggaagtgcatccacctggcaggtgacctggaggagtagcttccccgaggacccccaggcttggcctgtgattgcgcaaacccacatttcctaagcacactggacacccttcgagtgtgggttttaacatccctgtgagattgaatacttgtgccacacatgtcacaaaagagtatggaaataaaagaaaatttatccgaaaaaaaaaaaaaaaaaaaaaaaaaaaaaaaaaaaaaaaaaaaaaaaaaaaaaaaaaaaa

SEQ ID NO: 166 - DNA, 1719 bp, Homo sapiens
ggcacgaggcttttattcaactgaggtgtcagtttcttccactgaaaatgctgtcagttctgacctccgggcaggggatgtacctgttttatctttgagtaatagcagtgagaatgccgcctctgtgatcagctacagtggctctgcaccctcggtcattgtacacagcagccagttttcatcggtgatcatgcacagcaatgccattgctgccatgaccagcagcaaccacagagccttttcagacccagctgtcagtcagtccctgaaagatgacagtaagcccgagccagataaagtgggtaggtttgcaagcagacccaaaagcattaaggagaaaaagaaaactacatcacataccaggggagaaataccggaggagtcaaactatgttgctgatcctggaggatcactgagcaaaaccacaaatattgctgaagaaaccagcaaaattgaaacctacattgcaaaacctgctctgccgggaacctccacaaatagtaatgttgcacccctttgccaaataacagtgaaaattggaaacgaagccattgtgaaaaggcacattctaggatctaaattgttttataaaagagggagaagacccaagtatcagatgcaggaggagcctttgccacaggggaatgacccagaacccagtggagacagcccactcgggctttgccaatccgagtgcatggagatgagtgaagtgttcgatgacgcaagtgaccaggattccactgacaaaccgtggcgcccttactacaactacaaacccaaaaagaaatccagacagttgaaaaaaatgaggaaagtcaactggaggaaggagcacggaaacaggagcccgagccataaatgtaaatacccagcagaactggattgcgccgtggggaaggctcctcaggataaaccctttgaggaagaagaaactaaagagatgcccaagctgcagtgtgaactctgtgatggagacaaagcagtgggggctggaaaccaaggaaggccccaccgacatcttacttctcggccatatgcctgcgagctctgcgccaagcagttccagagcccttccacactcaaaatgcacatgagatgtcacaccggggagaagccataccagtgcaagacctgcggacggtgcttttcggtgcaaggaaacttacagaaacatgaacgcatccacctgggcttgaaggagttcgtctgtcagtattgcaacaaggcattcaccttgaatgagaccctcaaaatccatgaaagaatccatactggagaaaagcgttaccactgtcagttctgctttcagagatttttgtatctctccaccaaaaggaatcacgagcagaggcatattcgggagcataatgggaagggctatgcctgcttccagtgccccaaaatttgcaaaacagctgctgcccttggaatgcaccaaaagaaacacttattcaaaagcccaagtcagcaggagaaaataggtgacgtgtgccacgaaaactcaaatcccttggagaatcaacatttcattggttcagaagacaatgaccaaaaggataacatacaaaccggtgtggaaaatgttgtcctttgagtggcaagaattagaaaaatcttcaaaaatatagttggtggttttttttagttatgatttaagtttagtttcattttgtccatgtgacagtcatgaaggagtgaaaaaaaaaaaaaaaaaaa

SEQ ID NO: 167 - DNA, 2955 bp, Homo sapiens
ggggggggctgagtgctcagtggagagcggggagttgtgtccaccttgccgacgtcgctagccgtggggctgtcctgggaaggcggacggcgagcgcccggtgtccgcactcggccgcctgccgtgcccgtctgcgcccgtgtcatcctcactcgggacgcagggaccgtttttaaatcacaggggcgtgtgtcagcctgccctaggacttcatgtctatatatttccccattcactgccccgactatctgagatcggccaagatgactgaggtgatgatgaacacccagcccatggaggagatcggcctcagcccccgcaaggatggcctttcctaccagatcttcccagacccgtcagattttgaccgccgctgcaaactgaaggaccgtctgccctccatagtggtggaacccacagaaggggaggtggagagcggggagctccggtggccccctgaggagttcctggtccaggaggatgagcaagataactgcgaagagacagcgaaagaaaataaagagcagtagagtccctgtggactcccatgggtcataccagccagcatctgttcctgaactgtgtttttcccatcatgacggaagaagagagtgagccgcaattgttctgaaaatgtcaaacgaggcttctgttttgcacctgcagatcaccgagttggttttcttttcttttcttgccttttttttttttttgaaatttgccgagcagtggagccctctgacaatttgcaaggccctctgagaaaggaagctgcttagagccagggggttagtgggtgaggggagcgagtgctgtttttgagatcattatctgaactcaggcagcctagtagaggcagtggtgggattccaatgggtcttggtgggtgggaggtggggcatgtgcaaagcaagcaaggaacatttggggtaagaaaacaaacatgaggcaaaagaaaaaatacatgtttttaagaaaacattgagcagagaactgcagccaggatgcgctcagcagacattcactctggccgctgggacatcagaaaacaaagtcttcatctctctctccagtttcacccaccccaccctttgctttcatttcaggtgtgttggtctatatgacagggaggagagtaaaggagagcaggagcaattggctgcctgcaaagccagctggaggtgaagtgcaggaaaggaaaggtcaccccattctactccatggcctctctgctcccagctgtggtaggctcacatagccagtgtgatcggtttttaagaggcagtgcttttcagcttttctccctgatatatccattttgcttcccagcactttttaggagtagtgagagcacttcctgcccttgttggaagccccagggtggacactcagcacgaaggtctctcccttaactgctgcccttccaagacttgctcccgagatggagtgggcgtggtcttccaggctggcccttccttctcctcaccgccaccttccctgccccagccccagcagccatgggtacatgggtccccagctcacctatggattcccgccagtctgcccagctgcagtactcacgccccatgggggatcttggtctgtttttcttgtgggagcctagtggagagcagacgtggctttttatgtgtcttgttggggaggtgacttgcatggtggggacaaggctgtcgtggcaaccttgggatcgagtttgagactaaaggatgtcatgagatccctggcttctccccatgttgttcccggacaagggcagaagggaggcatggcaagggacctctgctgtccttactcaacagtggtcctcatccctccccacctcccactgcttcctgcaagggcaccagttgtatgagaaagttggcctttggacttaggatttcttattgtagctaagagccatctgaagcagcaggttgcaggacaaatgcttcagtccgccgagagcagtaccgtgtggccaagaggtggactcagagccttccttgagctaaactcggccaaccaaggcacgcagcatgtcccctcaggtctccagtcagtccaggttgaccctcagttctggacgtgtgtatatagctgtatttaatacctcaaggtcattgtggctctggggatgccagggcaggaggacgagggtgcgctgtggacacagcagtccgcggaattccgttctgggaagccaatggtcgccggcaccccttgcttcctccctctgttgtctgcctgtgtgacacacatcaatggcaataacttcttccaactcctcgcagaagtgggagaggccggcagcctgcaccgagaggggctttcctctctcttgctccccgcttcgttctgttttggctgcagagagtggttcatccatactctcattccctcgcctccccttgtggacgggggtcttgccttttcaattcctgtgttttggtgtcttcccttatctgctaccctgaatcacctgtcctggtcttgctgtgtgatgggaacatgcttgtaaactgcgtaacaaatctactttgtgtatgtgtctgtttatgggggtggtttattatttttgctggtccctagaccactttgtatgaccgtttgcagtctgagcaggccaggggctgacagctaatgtcaggaccctcagcggtggagcctgctggggggacccagctgctcttggacaagtggctgagctcctatctggcctcctcttttttttttttttcaagtaatttgtgtgtatttctaactgattgtattgaaaaaattcctagtatttcagtaaaaatgcctgttgtgagatgaacctcctgtaacttctatctgttcttttttgaggctcagggagaaactagcatttttttttttccaaactactttttgtcactgtgacagttgtaaataaagtttgaaaatgctcaaaaaaaaaaaaaaaaaaac

SEQ ID NO: 168 - DNA, 2010 bp, Homo sapiens
gtcgactaccagaaaatactttcaacataaatgaactctccaacttattaaacttttatatagatagaggaagacagctctttcgggataaccacctgatacctgcagaaacccccagtcctgttattttcagtgattttccatttatctttaattcgctatccaaaattaaattattgcaagctgattcacatataaagatgcagatgtcagaaaagaaagcatacatgcttatgcatgaaacaattctgcaaaaaaaggatgaatttcctccatcacccagatttatacttagagtcagacgaagtcgcctggttaaagatgctctgcgtcaattaagtcaagctgaagctactgacttctgcaaagtattagtggttgaatttattaatgaaatttgtcctgagtctggaggggttagttcagagttcttccactgtatgtttgaagagatgaccaagccagaatatggaatgttcatgtatcctgaaatgtgttcctgcatgtggtttcctgccaagcctaaacctgagaagaaaagatatttcctctttggaatgctgtgtggactctccttattcaatttaaatgttgctaaccttcctttcccactggctctgtataaaaaacttctggaccaaaagccatcattggaagatttaaaagaactcagtcctcggttggggaagagtttgcaagaagttctagatgatgctgctgatgacattggagatgcgctctgcatacgcttttctatacactgggaccaaaatgatgttgacttaattccaaatgggatctccatacctgtggaccaaaccaacaagagagactatgtttctaagtatattgattacattttcaacgtctctgtaaaagcagtttatgaggaatttcagagaggattttatagagtctgtgagaaggagatacttagacatttctaccctgaagaactaatgacagcaatcattggaaatactgattatgactggaaacagtttgaacagaattcaaagtatgagcaaggataccaaaaatcacatcctactatacagttgttttggaaggctttccacaagctaaccttggatgaaaagaaaaaattcctctttttccttacaggacgtgataggctgcatgcaagaggcatacagaaaatggaaatagtatttcgctgtcctgaaactttcagtgaaagagatcacccaacatcaataacttgtcataatattctctccctccctaagtattctacaatggaaagaatggaggaagcactccaagtagccatcaacaacaacagaggatttgtctcacccatgctcacacagtcataatcacctctgagagactcagggtgggctttctcacacttggatccttctgttcttccttacacctaaataatacaagagattaatgaatagtggttagaagtagttgagggagagattgggggaatggggagatgatgatgatggtcaaagggtgcaaaatctcacacaagactgaggcaggagaatagggtacagagatagggatctaaggatgacttggacacactccctggcactgaagagtctgaacactggcctgtgattggtccattccaggaccttcatttgcataaggtatcaaaccacatcagcctctgattggccatgggccagacctgcactctggccaatgattggttcattccaggacattcatttgcataaggagtcaaaccacaccagtcttggattggctgtgagccaattcacctcagtctctaattggctgtgagtcagtctttcatttacatagggtgtaaccatcaagaaacctctacagggtacttaagccccagaagattttgctaccagggctcttgagccacttgctctagcccactcccaccctgtggaatgtactttcacttttgctgcttcactgccttgtgctccaataaatccactccttcaccacccaaaaaaaaaaaaaaaaaaaaaaaaaaaaaaaaaa

SEQ ID NO: 169 - DNA, 619 bp, Homo sapiens
ttttgggaaaaatgtaatttatttgcactgcttccattcttctactgtagtgttaggacttaacataagcatcactcttctatttcctatttacattcttttggaatattactacaaatacaatatacaatttaaaaaaacttatggggaaacacagcttatgtttttttctcctctttacaggcttctcagtatcattcgacttcaatggaaatttatatggacattttctgtacatatcttaaaaggcagagattacactgataaagcctaaagaatcctgcacaaatacaatacagaaaacagaaagtacagacgatgttatttggggtacaaatataaacaatacagtaccatttgagtaactgagcaccataatacccatactttatagaaataaaactgcaaacctggagaatgctctgacaaatattaaacattatatacacaatgaggtaaatgtaccttggtctcttgagaggtaatttaagtttaaagcaattgacattttgaagcatctccttaacatatgaagaaatatcaaacaccctattccgttggcacaagtgaaaaaggggtatcaaaacatggttcatgatattcagttcacaaatcttgt

SEQ ID NO: 170 - DNA, 509 bp, Homo sapiens
ttttttttttttttagggtttagcatatttattttggaaaatcaacctgttttaaagttttatttttactggacaaaataggattaaatataaaatgacttttgctccaaaatatcattatttttgatttaccagtcttctcatgagagggcccattaaaaaaattaccttagtctaatctcaataacgtcaaactaattcatatctgaaatgtgtgctatttcatctttaatatccttaatctcagcttggactattggtaaattagatattttttcacttaagaaagcaatttctttctctctttgtagtaagtcggtaaccaatctcccaatgcgtagtgttaaatcatttactaatggttctaaacgggaaaagtccttctttagattatacacctttggttttagatcatttgcaaaagtcactgtcttcagaactttggctctgtcactttctaagcttagaaatctatctgtatgtttgtcgaagtcactctttagttcggg

SEQ ID NO: 171 - DNA, 575 bp, Homo sapiens
tttttcagctagaaataagttattttattttaaaacacatacagattaataaatattactggaaaacttaatagcctttttatttacatgaggcaataacaacatgctatgactacatctataaagcaaaatataagcaggtcttggccactgacacatgtgtctatgtatgctaattggaagctccccaatacatgtctatgacaaaacttttacacaaccaatcaacatttgacattttttacatcttcttcctctcatgattatattccattttcaagaaaataatagttatcctttgaaaaggcaaaacgctcaagccactgaaaaacagtatctaaattttctgtaaagtgcaaaaatactaaggtggggggcaattattatattctgacaaataaatattctgaacttttcaacatgaccctttggcactagtggtttgggagccctgacattcgcctggtgtcagttcagcatcagggttgagctgcttggaagcaggaagttcagcgtcatttattacaaatccagtgcaacagaatccacgtgtttcacaggccattaaatctttt

SEQ ID NO: 172 - DNA, 291 bp, Homo sapiens
  misc_feature (283)..(283): "n" = a, t, g, or c.
gcacgaggtacccggagcagagtcactgtggccacggagaaccgcagctgagctttatgaagccacgtggccacacctcccggtgcctccaccccaagcaaacacagatcgctcagaaaatgggaacccagggcaaattgtatgtgctccttactgggtttattataagtgtcacatgttttttataataaaacataggtgatttcaccttaaaaaaaaaaaaaaaaaaaaaaaaaaaaaaaaaaaaaaaaaaaaaaaaaaaaaaaaaaaaaaaaaaaacctngggggggg

SEQ ID NO: 173 - DNA, 339 bp, Homo sapiens
ttttttttttttttttttttttttttttttgggaaaaatgtaatttatttgcactgcttccattcttctactgtagtgttaggacttaacataagcatcactcttgtatttcctatttacattcttttggaatattactacaaatacaatatacaatttaaaaaaacttatggggaaacacagcttatgtttttttcccctctttacaggcttctcagtatcattcgacttcaatggaaatttatatggacattttctgtacatatcttaaaaggcagagattacactgataaagcctaaagaatcctgcacaaatacaatacagaaaacagaaagtac

SEQ ID NO: 174 - DNA, 404 bp, Homo sapiens
ctattggaatacttcagtttatacactacaaatcataatgttagcacacaacaaactttacatagtttctacaactgtcatttgcgattaattcatcctccatcatactacagataggtaacttcaaaataagagatgagtttattttcaaatgtgaaatcatgtcaacattttaatccaaactcaatatatttaacacacatatttaagaggcttactacatcatgcaattggattagaacacctttacaatcctatgaagagagtacagtgcagaaaagtcatatctttacattaaccaacaaaatcttagcaattatattttagtcttacatcactacagggtttaaaagtgatcgctgcaaaatcagattttaaaaatatcttccacaatcatgattttt

SEQ ID NO: 175 - DNA, 517 bp, Homo sapiens
gctcgacgaaaatgccagctcagatattttgagatactaaggattatctttggacatgtactgcagcttcttgtctctgttttggattactggaatacccatgggccctctcaagagtgctggacttctaggacattaagatgattgtcagtacattaaacttttcaatcccattatgcaatcttgtttgtaaatgtaaacttctaaaaatatggttaataacattcaacctgtttattacaacttaaaaggaacttcagtgaatttgtttttattttttaacaagatttgtgaactgaatatcatgaaccatgttttgatacccctttttcacgttgtgccaacggaatagggtgtttgatatttcttcatatgttaaggagatgcttcaaaatgtcaattgctttaaacttaaattacctctcaagagaccaaggtacatttacctcattgtgtatataatgtttaatatttgtcagagcattctccaggtttgcagttttatttctataaagta

SEQ ID NO: 176 - DNA, 580 bp, Homo sapiens
ttttatcatcgaaataatttatttaccactagagcaccacaaaaacagacatacatcgtgttaaaatacagcgtaattggtcatcaaaatacaaaacagctaatcttatattccattttttaaccatgccaacgatcaaattgtactgctgattaacacaaaaataattgctgcccacttgcatactagcacttcaccccttccttgccacctccacccccctcccatggcaatatttaccttatgggaaataaagaccttacagaacccccgaattagaaagataagaatcagattcaagagatcttaaaatagagcatttacaatattatccagggcattcatgaggaaaggcaaaatcatccagaacataatgtccaccaactgagaggaaaatgtctgcagaaataacagtgatttacacatgatggaaagtgggcagacaaaaaatattacaccaccttccaatctggggattggttcatgccacacagggcggttaatcatttgggatccatctctggatttccagttttcacatggaaaaccgattcttaattatgggacggaattccaaaag

SEQ ID NO: 177 - DNA, 566 bp, Homo sapiens
tttttggctttatagactctaaccatttatttaacaaaatggaaatttctaatatatagcacttttctacatttaaaattttagggaggagagactcatgttctacagtatacattattacaaaagagttcattataaatttaaatcagctgaaacaattcctttaatgattaggattcatcatcctttagtgcagcgaggtgacattttgtggaaagcatccatggctcttcgtcagagatgtcttaccagcacaaccttccttcactctgacctgtccatcagaggatttcctttaccagtaaaacagatggaagtccatttttctctttcggttcccaactcaagtgtagatcttttaatttaggaaagaactcaaacttatataaactaaagagtggaggttgttgttttcattctgtttactcacacactgctctgtaaagtcaaggttttcttgtcgattttgctcacatgctgattgctatgcatgcagccatcattagtgcaaatgcgcgggagactttttgaataatgtatagcacctaaaggaatgaacagcagac

SEQ ID NO: 178 - DNA, 588 bp, Homo sapiens
agagtaacaatttattagcagacaaaacaaatgaaacctctaaatctcaacacacatacaggatcttacataataaacagcataaaacataagcttctagaagaaaagtatctgctattaaccaactccccctcctttccagtaggctgcaatacattaataactcatcctcatcccataagagggttaagcaatgatttacatggaattacatcaaggcacttgctttaattaaaaaatacagtataaaacatgttcctaaaagtcatcaaccttgaataattaaagaaaaaacaggcagtatacttttttggtgaatagacaagactgagaatttaagttcattcacctgtcaccctgatattgtcttggtttgtgtacaaagttccaaagaagacaaaaaaaggtagcctattacatagattggtatgttcatacacactcatttctgagaaacagaagccatggcagcaacaggactcaaaccataattttccaactgatttgtgttgaaaaggcaagggctatttgatcccatgtatcttattattttagggatgacgcatgagataagggaagagaacatct

SEQ ID NO: 179 - DNA, 664 bp, Homo sapiens
gaagcttttatcaactttaattgatataattataattggtatgcaatatgtcttacaacaaatgtggatacaatgacatcaaatatcaaagaattttcccacctttccatctttaaatgacttcagctaacttaccccaagagaaaaatctggcattgatctcttggttagcattattaccaatatcaactagcactattaaaatcaaagttgaaatggtacattcatttgccaaaaaaaaaaaaaagaaaaaaaaggcttaaaggcaaagaaggtgaatcaacgtgcaaattagcatctggcccaattgcaaaattcatttcctggatgtgagggattgaaccatgcacacttgcaagcaagatgaagggcaaacagatgacatcaaatcaaaattaaccccacaaagaatccagaagacctcagatggtaaaggacagaggtctacgtctactgctgttagtgctcaggtatccatcctgttttccctaatctcctgattctgatccaagagtctttgagacctatgtcctaggccatcctttcatctagaaatggaaaccatggctgtggcaccaggcatggtcaaccctgcagtgattcagctgcacaaaagggtagtccagagcttagatagctgtctgatgtggctaggacacaactg

SEQ ID NO: 180 - DNA, 719 bp, Homo sapiens
tttttttttttttttttttttttaacttcaaaataagagatgagtttattttcaaatgtgaaatcatgtcaacattttaatccaaactcaatatatttaacacacatatttaagaggcttactacatcatgcaattggattagaacacctttacaatcctatgaagagagtacagggcagaaaagtcatatctttacattaaccaacaaaatcttagcaattatattttagtcttacatcactacagggtttaaaagtgatcgctgcaaaatcagattttaaaaatatcttccacaatcatgatttttggccttcactggtcaaggaaaatcttgtgtcatccagttgcaaaatcttattattgataacacgtatacgtgtatacaaaccacactgcaaattaacaaaagaattgtacccagtcaggctgacaaagtttaataaagggacacttctaatctaatcatttcatcttggaaggaatattggtattctctacatctattcatttgccatgttttaggaaagagcacattcatactttcaaacatgcaaaacatgataaactagaataaatggcacttgaaaaaccttataaaagagacttgcctgagtcgtttcattgacaaaataactaaaaaaaaggctattggaaaaaataaataaattatacatattgagaatataagtgaacttatttgccggttggagactacacc

SEQ ID NO: 181 - DNA, 635 bp, Homo sapiens
  misc_feature (566)..(566): "n" = a, t, g, or c.
  misc_feature (587)..(587): "n" = a, t, g, or c.
  misc_feature (596)..(596): "n" = a, t, g, or c.
  misc_feature (601)..(601): "n" = a, t, g, or c.
  misc_feature (606)..(606): "n" = a, t, g, or c.
taggtgacaagcaattttattttgcaaaacaatcactatacagcaacaaatacatttgcaaatttgattgaaaaacatgaactaactacaaccagccattgaagaaatgcctttctatggtaacaggctctagaattatcagaagaaagaaaccccccacagatttgtaacagtgtgttggaacctcggaatcccagcatacagagtatactttttgttgatttttttttctttttgctaaagttgaagtagatttttatgattgacattttattttctgagtttgaaaataagctttttcctgcagagagtcttggccttcacctacacacccaagctaaaaatcctaggtgtaaaaaaactcaaaacatcaatgcttattttagcacgtcaatctttgaaggaatggcttaaaatttccttaccaaggccatgaatctacttatctctagtatttagacctgagtagtttattttcccattgtggctgaaaaatagaagaaaactgtaattgcagctatgtcaaatcaaccacattcgggtattcctaataaaataccgtgganggtatatatggcgattattcncgctgcggnatacngtagngtgtgtgtgtgtgtgtgtgtgtgtgttga

SEQ ID NO: 182 - DNA, 578 bp, Homo sapiens
  misc_feature (82)..(82): "n" = a, t, g, or c.
  misc_feature (382)..(382): "n" = a, t, g, or c.
  misc_feature (398)..(398): "n" = a, t, g, or c.
  misc_feature (523)..(523): "n" = a, t, g, or c.
  misc_feature (554)..(554): "n" = a, t, g, or c.
  misc_feature (567)..(567): "n" = a, t, g, or c.
  misc_feature (574)..(574): "n" = a, t, g, or c.
caggttcgagtgattctcctgcctcggcctcccgagtagctgggattacgggcatgcgctaacacacccagctaattttgtntttttagtagagacgaggtttctccatgttcgacaggctggtctcgaactcccacctcagcctcccaaactgctgggattacaggtgtgagccaccgtgaccagccaatgtgccttcttatagtgtctactcattggtctttgttctgcccagtgataacaatgggataacgcctgctacacatcttcattgtgaaacccttcccctgtgctgagattaaatgaactctaagattattaaatagtatattttccttgacagcctagcgtttggatgattttaaagccttatgtataaatnaaccaaaagggaagtnagcagtcatattgctaatttgctaactcctatctattgaaatgggtgaagttttaaaaatttccccaggtaagtttaagattcaaacaccatccattgagcacctacattgtgtgccaggtagtnaaataggtgctttcatacacatcgtctcaantcctgtgaggtcngaattanctct

SEQ ID NO: 183 - DNA, 456 bp, Homo sapiens
  misc_feature (3)..(3): "n" = a, t, g, or c.
  misc_feature (21)..(21): "n" = a, t, g, or c.
ggnttttttttttaaagcccnaaaatgatgcaagtttagacatcacagactgttgggaagaaagctgagtcccttctcttttcttcatgttggcataaaacacatccagtacttgaggcagaaagataacaactttaacttttttcacagactgggctgatcctttctggacaaagtcttcaatggcatcaattatggcttcagcaaccttatctgggtgttgtttggcatttcctgtcccaatggctgggaggcaaatggatgagtaattttttttttcacactcctgcaaaacagaggaaactgaactcttgacatcatttccaccaattacatgaatgatattcttgcacctcaaaaatccacctccggtgattatataatcatttttgcgctgctgagcttgctgagaacattccctttctacattttggtccagcacattctaaaattgca

SEQ ID NO: 184 - DNA, 488 bp, Homo sapiens
ttactgttttttgtagtctttattctaggaggcatacccacttgaaaaatcaaaggttctatcattatgtgaaaagtaaagaatggatattgaaggaaaattggtgctctctgcacatctcttatttagatatttgtacagaaattcaaacttgaaaatcattctactgggaatatgacaggaatgactagctgacataccaactattctgggttttcatttataaaggattagtttacttcctttgttcatccaaaagcaatgaaatgcaaaacattacctgaatgagttccacgctatgttttattggtataaaaccaaaataagatgatgtaatactctggtctaccagttagttagctatttagacctaggtgaaaaaaaaatatttttaaggaaagaagaaaaatcttttacttataataaaatactgattagtcttgtcaatttatctgaccaaaacaaaaatagttctttaatttttatca

SEQ ID NO: 185 - DNA, 623 bp, Homo sapiens
  misc_feature (582)..(582): "n" = a, t, g, or c.
  misc_feature (608)..(608): "n" = a, t, g, or c.
gtaaggtgggagccagtaattatctgcagcaagtagtcagcactttcagtgatatgaatatcatcttggctggaggcaggtggacaacctgtcatcactgacttctgaaaagaaccctctggatattgattcctcgggtgtggttggactgtcatttagtggacaccgaatccagagtgccactgtgctcctcaacgaggacgtcagtgatgagaagactgctgaggctgcgatgcacgccctcaaagcggccaacattccagagcataacaccattggcttcatgtttgcatgcgttggcaggggctttcagtattacagagccaaggggaatgttgaggctgattgcatttagaaagttttttcctaagtgttcccttattcggcttctttggaaatgggagaaattggatgtgatcggatagtcactgggaactttatattgaggaaatgtaatgaggtaaaagatgatgatctgtttcatagctataccacaataatggcactcatacatctgggggtcatctaaataataatttaaagtggcttcataaaatggaacttttggggtccgccctttcngaaaatggaaccttggccatgtgtanttccaccaaatacct

SEQ ID NO: 186 - DNA, 510 bp, Homo sapiens
caggcatattagctttaatgtaggtggcgatgagtttttaggccaaggaaggaataatgttttatgtaccaaagccttttgtccccattttccgtcatacgaatagtattccctgttgctaagccgatgatacattacccttttcccataggtgtgagtggcggtctgaatggagaagttcaatagttctgattgcagatcctatgcaggagagataataaggaaaataatctttgtctcctggattaagctgaggctggcaaagagtgaaatgtcccaagccctctaacaacaaacgacatactttgtgttgtcctggatgctggtctggttgccaaatatgtggaactggccccatatgcgtgtactgttgtccatttcatgagagtaggctcgaggacaccatgggcaaggatctgatggttgccagcctaagcgttttagacttttgacccagagatttattgttttgggtgtggaaaaaattttccagtgaagggtctcaagata

SEQ ID NO: 187 - DNA, 597 bp, Homo sapiens; identical to SEQ ID NO: 74

SEQ ID NO: 188 - DNA, 1761 bp, Homo sapiens
atggctttagagatccacatgtcagaccccatgtgcctcatcgagaactttaatgagcagctgaaggttaatcaggaagctttggagatcctgtctgccattacgcaacctgtagttgtggtagcgattgtgggcctctatcgcactggcaaatcctacctgatgaacaagctggctgggaagaacaagggcttctctgttgcatctacggtgcagtctcacaccaagggaatttggatatggtgtgtgcctcatcccaactggccaaatcacacattagttctgcttgacaccgagggcctgggagatgtagagaaggctgacaacaagaatgatatccagatctttgcactggcactcttactgagcagcacctttgtgtacaatactgtgaacaaaattgatcagggtgctatcgacctactgcacaatgtgacagaactgacagatctgctcaaggcaagaaactcacccgaccttgacagggttgaagatcctgctgactctgcgagcttcttcccagacttagtgtggactctgagagatttctgcttaggcctggaaatagatgggcaacttgtcacaccagatgaatacctggagaattccctaaggccaaagcaaggtagtgatcaaagagttcaaaatttcaatttgcctcgtctgtgtatacagaagttctttccaaaaaagaaatgctttatctttgacttacctgctcaccaaaaaaagcttgcccaacttgaaacactgcctgatgatgagctagagcctgaatttgtgcaacaagtgacagaattctgttcctacatctttagccattctatgaccaagactcttccaggtggcatcatggtcaatggatctcgtctaaagaacctggtgctgacctatgtcaatgccatcagcagtggggatctgccttgcatagagaatgcagtcctggccttggctcagagagagaactcagctgcagtgcaaaaggccattgcccactatgaccagcaaatgggccagaaagtgcagctgcccatggaaaccctccaggagctgctggacctgcacaggaccagtgagagggaggccattgaagtcttcatgaaaaactctttcaaggatgtagaccaaagtttccagaaagaattggagactctactagatgcaaaacagaatgacatttgtaaacggaacctggaagcatcctcggattattgctcggctttacttaaggatatttttggtcctctagaagaagcagtgaagcagggaatttattctaagccaggaggccataatctcttcattcagaaaacagaagaactgaaggcaaagtactatcgggagcctcggaaaggaatacaggctgaagaagttctgcagaaatatttaaagtccaaggagtctgtgagtcatgcaatattacagactgaccaggctctcacagagacggaaaaaaagaagaaagaggcacaagtgaaagcagaagctgaaaaggctgaagcgcaaaggttggcggcgattcaaaggcagaacgagcaaatgatgcaggagagggagagactccatcaggaacaagtgagacaaatggagatagccaaacaaaattggctggcagagcaacagaaaatgcaggaacaacagatgcaggaacaggctgcacagctcagcacaacattccaagctcaaaatagaagccttctcagtgagctccagcacgcccagaggactgttaataacgatgatccatgtgttttactctaa

SEQ ID NO: 189 - DNA, 4284 bp, Homo sapiens
ggccaaggcggcgaccggagcgcgatggcgggggcggcgggactcacggcagaagtgagctggaaggtcttggagcgaagagctcggaccaagcgctcaggctcagtttatgaacctcttaaaagcattaatcttccaagacctgataatgaaactctctgggataagttggaccattattacagaattgtcaagtcaacattgctgctgtatcaaagtccaactaccggtctctttcccactaaaacatgcggtggtgaccagaaggccaagatccaggacagcctatactgcgctgctggggcctgggctttggctcttgcatacaggcgaattgatgatgacaagggaaggacccatgagctggagcactcagctataaaatgcatgagaggaattctctactgctatatgcgtcaggccgataaggtccagcagtttaagcaggatccacgcccaacaacatgtcttcactctgttttcaatgtgcatacaggagatgagttgctttcctatgaggaatatggtcatcttcagataaatgcagtgtcactttatctcctttaccttgtggaaatgatttcctcaggactccagattatctacaacactgatgaggtctcttttattcaaaaccttgtattttgtgtggaaagagtttaccgtgtgcctgactttggtgtctgggaaagaggaagcaaatataataatggcagcacagagctacattcgagctcggttggtttagcaaaagcagctctagaagcaattaatggattcaacctttttggcaaccagggctgttcgtggtcagttatatttgtggatctcgatgctcacaatcgcaacaggcaaactttgtgctcgctgttacccagagaatcaagatcacataatacagatgctgccctgctcccctgcatcagttatcctgcatttgccctggatgatgaagttctttttagccagacacttgataaagtggttagaaaattaaaaggaaaatatggatttaaacgtttcttgagagatgggtatagaacatcattggaagatcccaacagatgctactacaagccagctgaaattaagctatttgatggcattgaatgtgaatttcccatatttttcctttatatgatgattgatggagtttttagaggcaatcctaagcaagtacaggaatatcaggatcttttgactccagtacttcatcataccacagaaggatatcctgttgtaccaaagtactattatgtgccagctgactttgtagaatatgaaaaaaataaccctggtagtcaaaaacgatttcctagcaactgtggccgtgatggaaaactgtttctttggggacaagcactttatatcatcgcaaaactcctggctgatgaacttattagtcctaaagacattgatcctgtccagcgctatgtcccactaaaggatcaacgtaacgtgagcatgaggttttccaatcagggcccactggaaaatgacttggtagttcatgtggcacttatagcagaaagccaaagacttcaagtttttctgaacacatatggtattcaaactcaaactcctcaacaagtagaacccattcagatatggcctcagcaggagcttgtgaaagcttatttgcagctgggtatcaatgaaaagttaggactctctggaaggccagacaggcccattggctgcctcgggacatcaaagatttatcgcattctaggaaagactgtggtttgttacccgattattttcgacctaagtgatttctacatgtctcaggatgttttcctgctgatagatgacataaagaatgcgctgcagttcattaaacaatattggaaaatgcatggacgtccacttttccttgttctcatccgggaagacaatataagaggtagccggttcaaccccatattagatatgctggcagcccttaaaaaaggaataattggaggagtcaaagttcatgtggatcgtctacagacactaatatctggagctgtggtagaacaacttgatttcctacgaatcagtgacacagaagagcttccagaatttaagagttttgaggaactagaacctcccaaacattcaaaagtcaaacggcaaagcagcacccctagtgctcctgaactgggacagcagccggatgtcaacattagtgaatggaaggacaaacccacccacgaaattcttcaaaaactgaatgattgcagttgtctggctagccaagccatcctgctgggtatactgctcaaaagagaaggccccaacttcatcacaaaggaaggtaccgtttctgatcacattgagagagtctatagaagagctggcagccaaaaactttggttggcggtgcgctacggggctgcatttacccagaaattttcttcctctatagccccacacattactacttttctggtacatgggaaacaggtaactctgggtgcctttgggcatgaagaagaagttatctctaatcctttgtctccaagagtgattcaaaacatcatctattataagtgtaacacccatgatgagagggaagcggtcattcagcaagaactggtcatccatattggctggatcatctccaataaccctgagttattcagtggcatgctgaaaatacgaatcgggtggatcatccatgccatggagtatgaacttcagatccgtggcggagacaagccagccttggacttgtatcagctgtcacctagtgaagttaaacagcttctgctggatattctgcagcctcaacagaatggaagatgttggctgaacaggcgtcagatcgatgggtctttgaatagaactcccaccgggttctatgaccgagtgtggcagattctggagcgcacgcccaatgggatcattgttgctgggaagcatttgcctcagcaaccaaccctgtcagatatgaccatgtatgagatgaatttctctctccttgttgaagacacgttgggaaatattgaccagccacagtacagacagatcgttgtagagttacttatggttgtatccattgtactggaaagaaaccccgagctagaatttcaagacaaagtagatctagacagactggtcaaagaagcatttaatgaatttcaaaaagatcagagtcggctaaaggaaattgaaaaacaagatgacatgacttccttttacaacactcctcccctgggaaaaagaggaacatgcagctatttgacaaaggcggtgatgaatctgctgctggaaggagaagtcaagccaaacaatgatgacccgtgtctgattagctagtggggaaggtgtaggaagctctgttgagacacatgttctgaagtgtgttgtgtttcatgttcaagcttaatcaaggcagccattaatatacgaactgagcatgctggggaggtgaatgccacatccttggcggggttatggacctcttgcatgtcatagccaatctaacggtaatggtaaatgcttttaatcaagcaggaaaaagttctcatgattatgccaactataatagtaatcctcactgagtgataaaaatagtttatgaattgaaaatttgccgctgcatgttgtatgatcaaatagttcatcaaaatgaatctttgctctttggactgaattcttaccatactgccattaaaataaatttgccaactagtaatgcatactggaaatcaaaagatactgaaagaatggtgaacttctcttagtggtattgtcatgctaaaagatgttaatatacatcataaaagcaaagtcagccagctgatattttggttctcaaaaactgcattattaataatattttagtatacagagctattctacagtttttacattgtaaacatgactgtggttttgtatttgctaaatataggggttggactaaaatataataaatctgtaccttatcaaacattttctttgagctcctgctaaaaataggacatgtctatgattgttcaaaaatatgttaaatttaggctcagcacagtagctcacacctgaaatcttagcacttcgggaggctgaggcaggtggatcacttgaggttaggagttcaagaccagcccagccaacatggtgaaaaccctgtctctactaaaaatacaaaaattagccaggcatgatggtgcatgccttttaaacccagctactgaggaggctgaggcatgagaattgcttgaaccaggagacggaggttgcagtgagctgaaatcctgccactgcacaccagcctgggtgacagagcgagactcc

SEQ ID NO: 190 - DNA, 7525 bp, Homo sapiens; identical to SEQ ID NO: 83

SEQ ID NO: 191 - DNA, 1579 bp, Homo sapiens
tcccgccgcctctgcgcccgcgccgcgcccccggcgccccctccccagcgcgcccccggccgctcctccgcgccgcgctcgtcggccatggcccgggagaacggcgagagcagctcctcctggaaaaagcaagctgaagacatcaagaagatcttcgagttcaaagagaccctcggaaccggggccttttccgaagtggttttagctgaagagaaggcaactggcaagctctttgctgtgaagtgtatccctaagaaggcgctgaagggcaaggaaagcagcatagagaatgagatagccgtcctgagaaagattaagcatgaaaatattgttgccctggaagacatttatgaaagcccaaatcacctgtacttggtcatgcagctggtgtccggtggagagctgtttgaccggatagtggagaaggggttttatacagagaaggatgccagcactctgatccgccaagtcttggacgccgtgtactatctccacagaatgggcatcgtccacagagacctcaagcccgaaaatctcttgtactacagtcaagatgaggagtccaaaataatgatcagtgactttggattgtcaaaaatggagggcaaaggagatgtgatgtccactgcctgtggaactccaggctatgtcgctcctgaagtcctcgcccagaaaccttacagcaaagccgttgactgctggtccatcggagtgattgcctacatcttgctctgcggctaccctcctttttatgatgaaaatgactccaagctctttgagcagatcctcaaggcggaatatgagtttgactctccctactgggatgacatctccgactctgcaaaagacttcattcggaacctgatggagaaggacccgaataaaagatacacgtgtgagcaggcagctcggcacccatggatcgctggtgacacagccctcaacaaaaacatccacgagtccgtcagcgcccagatccggaaaaactttgccaagagcaaatggagacaagcatttaatgccacggccgtcgtgagacatatgagaaaactacacctcggcagcagcctggacagttcaaatgcaagtgtttcgagcagcctcagtttggccagccaaaaagactgtgcgtatgtagcaaaaccagaatccctcagctgacactgaagacgagcctggggtggagaggagggagccggcatctgccgagcacctcctgtttgccaggcgctttctatacttaatcccatgtcatgcgaccctaggactttttttaacatgtaatcactgggctgggtgcagtggctcacgcctgtaatcccaacactttgggaggctgaggcaggaggactgtttgagttcaggagttttaagaccagcctgaccaacatggtgaaaccccatctctactaaaatataaaaattagccgggtgtggtggcgagcacctgtaatgtcagctacttgggaggctgaggcaggagaatcacttgaacccaggaagcggaggttgcaatcagctgagatcacaccactgcactccagcctgggtgacagattgagactccctctcaaaaaaa

SEQ ID NO: 192 - DNA, 1869 bp, Homo sapiens
gctccgcggcgccggctgcgaagttgagcgaaaagtttgaggccggagggagcgaggccggggagtccgctccagcggggcgctccagtccctcagacgtgggctgagcttgggacgagctgcgttccgccccaggccactgtagggaacggcggtggcgcctccccagcaaaccggaccgactgggtccagccgccgcagggaatgacaccggtgctcctacagccacggctccgggcggggaaggcgagccccacagccggccctgcgacgccctcctgggcagcaccgataaggagctgaaggcaggagccgccgccacgggcagcgcccccacagcgccagggaccccctggcagcgggagccgcgggtcgaggttatggatccagtggtcggttgcggacgtggcctctttggttttgttttctcagcgggcggcccccggggcgtgctcccgcggccctgccgcgtgctggtgctgctgaacccgcgcggcggcaagggcaaggccttgcagctcttccggagtcacgtgcagccccttttggctgaggctgaaatctccttcacgctgatgctcactgagcggcggaaccacgcgcgggagctggtgcggtcggaggagctgggccgctgggacgctctggtggtcatgtctggagacgggctgatgcacgaggtggtgaacgggctcatggagcggcctgactgggagaccgccatccagaagcccctgtgtagcctcccagcaggctctggcaacgcgctggcagcttccttgaaccattatgctggctatgagcaggtcaccaatgaagacctcctgaccaactgcacgctattgctgtgccgccggctgctgtcacccatgaacctgctgtctctgcacacggcttcggggctgcgcctcttctctgtgctcagcctggcctggggcttcattgctgatgtggacctagagagtgagaagtatcggcgtctgggggagatgcgcttcactctgggcaccttcctgcgtctggcagccctgcgcacctaccgcggccgactggcctacctccctgtaggaagagtgggttccaagacacctgcctcccccgttgtggtccagcagggcccggtagatgcacaccttgtgccactggaggagccagtgccctctcactggacagtggtgcccgacgaggactttgtgctagtcctggcactgctgcactcgcacctgggcagtgagatgtttgctgcacccatgggccgctgtgcagctggcgtcatgcatctgttctacgtgcgggcgggagtgtctcgtgccatgctgctgcgcctcttcctggccatggagaagggcaggcatatggagtatgaatgcccctacttggtatatgtgcccgtggtcgccttccgcttggagcccaaggatgggaaaggtgtgtttgcagtggatggggaattgatggttagcgaggccgtgcagggccaggtgcacccaaactacttctggatggtcagcggttgcgtggagcccccgcccagctggaagccccagcagatgccaccgccagaagagcccttatgacccctgggccgcgctgtgccttagtgtctacttgcaggacccttcctccttccctagggctgcagagcctgtccacagctcctgtgggggtggaggagactcctctggagaagggtgagaaggtggaggctatgctttggggggacaggccagaatgaagtcctgggtcaggagcccagctggctgggcccagctgcctatgtaaggccttctagtttgttctgagacccccaccccacgaaccaaatccaaataaagtgacattcccagcctgaaaaaaaaaaaaaaaaaa

SEQ ID NO: 193 - DNA, 2010 bp, Homo sapiens
gccacagcccagctgttccctccgcggattctccggggctggttcatcacctccgaatattcctgtgacaggagacgcttgcaaaacccgcctccagcctccagcagcaaataaatagaaggcttgcagcccagaaggagccagaagaagtttctaggcacgaggccctgggtttattaagctcctggctccgctctagacctcagcggttctggctgccagcctgggcagcctgggaagcctgggaggacggtggcttgccggtctgtcgtgaggcagtgcggacggggaccctctgggattctgctggatctgccccgggggttacctttgggggctgggaccccagtcgaggggacacaaccgtccctggcagtggttggttctgcttctccctgcagaaaagcagcattttcggaagctgaagaataagctagcccagccacaccaccttgttgtgtgaccttgggcaggtggttctgtctctctgagcctctgtttctctctgagctgagcagccaccatggctgacggtcagatgcccttctcctgccactacccaagccgcctgcgccgagaccccttccgggactctcccctctcctctcgcctgctggatgatggctttggcatggaccccttcccagacgacttgacagcctcttggcccgactgggctctgcctcgtctctcctccgcctggccaggcaccctaaggtcgggcatggtgccccggggccccactgccaccgccaggtttggggtgcctgccgagggcaggacccccccacccttccctggggagccctggaaagtgtgtgtgaatgtgcacagcttcaagccagaggagttgatggtgaagaccaaagatggatacgtggaggtgtctggcaaacatgaagagaaacagcaagaaggtggcattgtttctaagaacttcacaaagaaaatccagcttcctgcagaggtggatcctgtgacagtatttgcctcactttccccagagggtctgctgatcatcgaagctccccaggtccctccttactcaacatttggagagagcagtttcaacaacgagcttccccaggacagccaggaagtcacctgtacctgagatgccagtactggcccatccttgttttgtccccaaccctagggcttctctgattccaggatacattactttagctgaactcagatttagtgcaagtaaaatgttagagggtgcgggggtgaggactgaccacagattccctggatagtgtagtggtagatttctccacaggatagcgcaattggcaaatcatgcttggttgtgttaggccaaaatactagttttgctttctttaccttttctatcttgatgaaaatgttgcacattctatagttgcaaaacacataaaaggggacttaacatttcacgttgtatcttacttgcagtgaatgcaagggttacttttctctggggacctcccccatcacccaggttcctactctgggctcccgattcccatggctcccaaaccatgccgcatggtttggttaatgaaacccagtagctaaccccactgtgcttccacatgcctggcctaaaatgggtgatatacaggtcttatatccccatatggaatttatccatcaaccacataaaaacaaacagtgccttctgccctctgcccagatgtgtccagcacgttctcaaagtttccacattagcactccctaaggacgctgggagcctgtcagtttatgatctgacctaggtcccccctttcttctgtcccctgtgtttaagtcgggatttttacagagggagctgtctccagacagctccatcaggaaccaagcaaaggccagatagcctgacagataggctagtggtattgtgtatatgggcgggacgtgtgtgtcattattatttgagttatgctgttgtttaggggtaaataacagtaaataattaataataataataataataataataaaggagctgacgttcttaaaaaa

SEQ ID NO: 194 - DNA, 3445 bp, Homo sapiens
gagcaaccgcagcttctagtatccagactccagcgccgccccgggcgcggaccccaaccccgacccagagcttctccagcggcggcgcagcgagcagggctccccgccttaacttcctccgcggggcccagccaccttcgggagtccgggttgcccacctgcaaactctccgccttctgcacctgccacccctgagccagcgcgggcgcccgagcgagtcatggccaacgcggggctgcagctgttgggcttcattctcgccttcctgggatggatcggcgccatcgtcagcactgccctgccccagtggaggatttactcctatgccggcgacaacatcgtgaccgcccaggccatgtacgaggggctgtggatgtcctgcgtgtcgcagagcaccgggcagatccagtgcaaagtctttgactccttgctgaatctgagcagcacattgcaagcaacccgtgccttgatggtggttggcatcctcctgggagtgatagcaatctttgtggccaccgttggcatgaagtgtatgaagtgcttggaagacgatgaggtgcagaagatgaggatggctgtcattgggggtgcgatatttcttcttgcaggtctggctattttagttgccacagcatggtatggcaatagaatcgttcaagaattctatgaccctatgaccccagtcaatgccaggtacgaatttggtcaggctctcttcactggctgggctgctgcttctctctgccttctgggaggtgccctactttgctgttcctgtccccgaaaaacaacctcttacccaacaccaaggccctatccaaaacctgcaccttccagcgggaaagactacgtgtgacacagaggcaaaaggagaaaatcatgttgaaacaaaccgaaaatggacattgagatactatcattaacattaggaccttagaattttgggtattgtaatctgaagtatggtattacaaaacaaacaaacaaacaaaaaacccatgtgttaaaatactcagtgctaaacatggcttaatcttattttatcttctttcctcaatataggagggaagatttttccatttgtattactgcttcccattgagtaatcatactcaattgggggaaggggtgctccttaaatatatatagatatgtatatatacatgtttttctattaaaaatagacagtaaaatactattctcattatgttgatactagcatacttaaaatatctctaaaataggtaaatgtatttaattccatattgatgaagatgtttattggtatattttctttttcgtctatatatacatatgtaacagtcaaatatcatttactcttcttcattagctttgggtgcctttgccacaagacctagcctaatttaccaaggatgaattctttcaattcttcatgcgtgcccttttcatatacttattttattttttaccataatcttatagcacttgcatcgttattaagcccttatttgttttgtgtttcattggtctctatctcctgaatctaacacatttcatagcctacattttagtttctaaagccaagaagaatttattacaaatcagaactttggaggcaaatctttctgcatgaccaaagtgataaattcctgttgaccttcccacacaatccctgtactctgacccatagcactcttgtttgctttgaaaatatttgtccaattgagtagctgcatgctgttcccccaggtgttgtaacacaactttattgattgaatttttaagctacttattcatagttttatatccccctaaactacctttttgttccccattccttaattgtattgttttcccaagtgtaattatcatgcgttttatatcttcctaataaggtgtggtctgtttgtctgaacaaagtgctagactttctggagtgataatctggtgacaaatattctctctgtagctgtaagcaagtcacttaatctttctacctcttttttctatctgccaaattgagataatgatacttaaccagttagaagaggtagtgtgaatattaattagtttatattactctcattctttgaacatgaactatgcctatgtagtgtctttatttgctcagctggctgagacactgaagaagtcactgaacaaaacctacacacgtaccttcatgtgattcactgccttcctctctctaccagtctatttccactgaacaaaacctacacacataccttcatgtggttcagtgccttcctctctctaccagtctatttccactgaacaaaacctacgcacataccttcatgtggctcagtgccttcctctctctaccagtctatttccattctttcagctgtgtctgacatgtttgtgctctgttccattttaacaactgctcttacttttccagtctgtacagaatgctatttcacttgagcaagatgatgtaatggaaagggtgttggcattggtgtctggagacctggatttgagtcttggtgctatcaatcaccgtctgtgtttgagcaaggcatttggctgctgtaagcttattgcttcatctgtaagcggtggtttgtaattcctgatcttcccacctcacagtgatgttgtggggatccagtgagatagaatacatgtaagtgtggttttgtaatttaaaaagtgctatactaagggaaagaattgaggaattaactgcatacgttttggtgttgcttttcaaatgtttgaaaacaaaaaaaatgttaagaaatgggtttcttgccttaaccagtctctcaagtgatgagacagtgaagtaaaattgagtgcactaaacaaataagattctgaggaagtcttatcttctgcagtgagtatggcccgatgctttctgtggctaaacagatgtaatgggaagaaataaaagcctacgtgttggtaaatccaacagcaagggagatttttgaatcataataactcataaggtgctatctgttcagtgatgccctcagagctcttgctgttagctggcagctgacgctgctaggatagttagtttggaaatggtacttcataataaactacacaaggaaagtcagccactgtgtcttatgaggaattggacctaataaattttagtgtgccttccaaacctgagaatatatgcttttggaagttaaaatttaaatggcttttgccacatacatagatcttcatgatgtgtgagtgtaattccatgtggatatcagttaccaaacattacaaaaaaattttatggcccaaaatgaccaacgaaattgttacaatagaatttatccaattttgatctttttatattcttctaccacacctggaaacagaccaatagacattttggggttttataataggaatttgtataaagcattactctttttcaataaattgttttttaatttaaaaaaaggaaaaaaaaaaaaaaaaa

SEQ ID NO: 195 - DNA, 1928 bp, Homo sapiens
gagcagaacagggaggctagagcgcagcgggaaccggcccggagccggagccggagccccacaggcacctactaaaccgcccagccgatcggcccccacagagtggcccgcgggcctccggccgggcccagtcccctcccgggccctccatggcccgggccgctgccctcctgccgtcgagatcgccgccgacgccgctgctgtggccgctgctgctgctgctgctcctggaaaccggagcccaggatgtgcgagttcaagtgctacccgaggtgcgaggccagctcgggggcaccgtggagctgccgtgccacctgctgccacctgttcctggactgtacatctccctggtgacctggcagcgcccagatgcacctgcgaaccaccagaatgtggccgccttccaccctaagatgggtcccagcttccccagcccgaagcctggcagcgagcggctgtccttcgtctctgccaagcagagcactgggcaagacacagaggcagagctccaggacgccacgctggccctccacgggctcacggtggaggacgagggcaactacacttgcgagtttgccaccttccccaaggggtccgtccgagggatgacctggctcagagtcatagccaagcccaagaaccaagctgaggcccagaaggtcacgttcagccaggaccctacgacagtggccctctgcatctccaaagagggccgcccacctgcccggatctcctggctctcatccctggactgggaagccaaagagactcaggtgtcagggaccctggccggaactgtcactgtcaccagccgcttcaccttggtgccctcgggccgagcagatggtgtcacggtcacctgcaaagtggagcatgagagcttcgaggaaccagccctgatacctgtgaccctctctgtacgctaccctcctgaagtgtccatctccggctatgatgacaactggtacctcggccgtactgatgccaccctgagctgtgacgtccgcagcaacccagagcccacgggctatgactggagcacgacctcaggcaccttcccgacctccgcagtggcccagggctcccagctggtcatccacgcagtggacagtctgttcaataccaccttcgtctgcacagtcaccaatgccgtgggcatgggccgcgctgagcaggtcatctttgtccgagaaacccccagggcctcgccccgagatgtgggcccgctggtgtggggggccgtgggggggacactgctggtgctgctgcttctggctggggggtccttggccttcatcctgctgagggtgaggaggaggaggaagagccctggaggagcaggaggaggagccagtggcgacgggggattctacgatccgaaagctcaggtgttgggaaatggggaccccgtcttctggacaccagtagtccctggtcccatggaaccagatggcaaggatgaggaggaggaggaggaggaagagaaggcagagaaaggcctcatgttgcctccacccccagcactcgaggatgacatggagtcccagctggacggctccctcatctcacggcgggcagtttatgtgtgacctggacacagacagagacagagccaggcccggccctcccgcccccgacctgaccacgccggcctagggttccagactggttggacttgttcgtctggacgacactggagtggaacactgcctcccactttcttgggacttggagggaggtggaacagcacactggacttctcccgtctctagggctgcatggggagcccggggagctgagtagtggggatccagagaggacccccgcccccagagacttggttttggctccagccttcccctggccccgtgacactcaggagttaataaatgccttggaggaaaacaaaaaaaaaaaaaaaaaaaaaa

SEQ ID NO: 196 - DNA, 4009 bp, Homo sapiens
ccggagggggcggccgcggagcactggttggagcgccgcgccgcgcccgagcctcttgccttcgcgggcggcgccctggccgccggcagccttgtggccggtgccccgatccgccgcgctccggacccgggcaggcggggcgcgcccgctgcgcgcgggatgtggcagcccagacggccctggccccgcgtgccctggcgctgggcgctggcgctgctggccctggttggcgcggggctgtgccacgccggcccgcagcccgggtatcccgcgcggcccagcgccaggaacaagaactggtgcgcctacatcgtgaacaagaatgtgagctgctccgtgctggagggaagtgagagttttattcaggctcagtacaactgtgcctggaaccagatgccctgtccgtcggcgctggtgtatcgagtgaacttcagacctagatatgtcactaggtataagacagtgacacagttggaatggaggtgctgtcctggctttagagggggagattgccaagaaggtcccaaagaccccgtgaagaccctccgccccacgccggctcggcctcgaaatagcttgaagaaagccacagataatgaacccagccaattctcagagcccaggaagactttgtccccaactggtacagcacaaccaagctggggggtagatccaaaagaggggcctcaggaacttcaggaaaagaagatacaggtgctagaggagaaggttcttcgactcacaaggacggttcttgacctccagtcttcccttgctggagtgagtgaaaatctcaaacatgccactcaggatgatgccagtagaacacgggcaccagggctcagcagccagcaccccaagcctgacaccactgttagtggagacacagaaacgggccagagtcctggtgtcttcaacactaaggaatctggcatgaaggacatcaagtctgaattggctgaagtcaaagatactctaaagaacaaaagtgacaagctggaagagctggatggaaaagtgaagggctacgaagggcagctcagacagctccaggaagcagctcagggcccgacggtgaccatgacaaccaacgaactctaccaagcctatgtggacagtaagatcgacgccctgagagaggagctcatggagggcatggacagaaagctggctgacctgaaaaactcatgtgagtacaagctcactggcctccagcagcagtgtgatgactatgggagcagctacctgggagtgatagagctcataggggagaaggaaacaagcctgagaaaagaaataaataacctccgagcccggctacaggagccttcagcccaggcaaattgctgcgacagtgaaaagaatggtgacattggtcaacagatcaagacattggaccagaaaatcgagagagttgctgaagccaccagaatgctgaatggaagactggacaatgagtttgaccgccttatagttccagagccagatgtggattttgatgcaaaatggaatgaactcgatgcaaggatcaatgtgacggagaagaacgctgaagaacattgcttttacattgaggaaacccttcggggcgccattaatggagaggtgggtgacttgaagcagcttgttgatcagaaaatacagtctctggaagaccgtctggggagcgttctcctacagatgaccaataacactggtgcagagctcagtcccccaggggcagcagccctgccaggagtgtcagggtcaggagatgaacgggtcatgatggaattaaaccacctgaaggacggagttcaagttgttgaagacatttgcctgctgaacatccagggaaagcctcatgggatggaaggtgccttgccaaacagggaagaccgcgcagtacgcgacagcctgcaccttttgaaatctctcaacgacacgatgcacaggaagtttcaagaaaccgaacaaaccatccagaaacttcaacaggattttagttttctttattctcaattaaaccacacagaaaatgatgtgactcatcttcaaaaggaaatgagcaattgtagagcaggtgaaaacgctggcatgggtaggttcactaaggtgggtgagcaagaaaggacagtggacaccctgccgtccccccagcaccccgtggctcattgctgcagtcagctggaggagaggtggcagaggttgcagagccaggtcatctcggagctggatgcttgtaaggaatgcacgcagggggtccagagggaggtctccatggtggagggcagggtgtctcatatggagaaaacttgcagcaagctggactctatctcaggaaatcttcagaggatcaaggaggggctcaacaagcatgtcagcagcctgtggaactgtgtcaggcagatgaacggaacgctcaggtcgcattccagagacatttctggcctgaagaattcagtccagcagttctacagccacgtcttccagatttctactgatttgcaagatctggtcaaatttcagccatcagcaaaggcgccctcgcccccgccgcccgcagaggccccgaaggagccgctgcagcccgagcccgccccgccgaggcccagcggccccgcaaccgcagaggaccctgggcgacggcccgtcctgccccagcggccccccgaggagaggccgccccagccgccaggctccaccggggtcatcgcggagacgggccaggccgggccccccgcaggcgcaggcgtgtctgggcggggtctgccgcggggcgtggacggccagaccgggagcggcaccgtccccggcgcagaaggcttcgcgggcgcaccaggatacccgaagtcacctcctgtagcttccccaggagctccggtgtcttctctggtgtctttttctgcggggctcacccagaagcctttccccagtgatgggggcgttgtcctctttaacaaagtgctggtgaacgacggggatgtttacaaccccagcaccggggtcttcacggctccttatgatgggcgctacctgatcacggccaccctcacccccgagagagacgcctacgtggaagcagtgctgtcggtctccaacgccagcgtggcccagctgcataccgctgggtacaggagagagttcctggaataccaccgccctccaggagctttgcatacctgcgggggcccgggggcattccacctcatcgtgcacctgaaggcgggagatgcagtcaacgtcgtggtgactgggggcaagctggctcacacagactttgatgaaatgtactccacatttagtggggttttcttatatcctttcctttcccacctctaaggtggctggggagatgtcaggggaaagatagatagttgtaaaaactctaaagctttaatatattcggtttgtatgtaatggaagcacggggctagagtttccacataggccccaacataaaggccttccctcgctgttgaggccaccatgccttactgcatccagccaggctgcagggagtgaggcacacggtgaacatggccactgacttttctgccactctaactggacaactggaagacttggaaaggcctccacctgtatctacactctgagggccctggactgggcctgagcttgccacagaggctccgtctgactgtgggctgggaggagggaggcaggggagagccggtcacggtggctggtctttactgcagggcagcactgtggccagctgtctgtctttacactgcatgcagaagtttaaacactgaagtgccgaagtggcccgtgccgccgcacagagaccccgactttagtttgggctgttccacgcttggctcaccattgccgcctgggacttaacctgctcaggcgggccttcgcccagctgcaaatagggatgcgttagagactgttcccaaagcttgttgggctccttaaatggcatgtacaatttaagtgcaaagacagggagtgtcaataaagatggaaagccatttccagttaacttttgttaatttaa

SEQ ID NO: 197 - DNA, 1188 bp, Homo sapiens; identical to SEQ ID NO: 103

SEQ ID NO: 198 - DNA, 3159 bp, Homo sapiens
atggctgggatggacagtggcaacctgaagaccgcgaggctgtggcgggacgccgccctgcgtgccaggaagctgcggagcaacctgcgccagctcacgctcaccgccgccggggcctgccccggggccggggccgacgcgctcgagtcccccgcctccccccagctcgtgctgccggccaacctcggggacattgaggcactgaacctggggaacaacggcctggaggaggtacccgaggggctggggtcggcgctgggcagcctgcgcgtcctggtcctgcgcaggaaccgcttcgcccggctgcccccggcggtggccgagctcggccaccacctcaccgagctggacgtgagccacaaccggctgaccgccctgggcgcggaggtggtgagtgctctgagggagctgcggaagctcaacctcagccacaaccagctgcccgccctgcccgcccagctgggcgctctcgctcacctggaggagctggatgtcagctttaaccggctggcgcacctgcctgactccctctcctgcctctcccgcctgcgcaccctggacgtggatcacaaccagctcactgccttcccccggcagctgctgcagctggtggccctggaggagctggacgtgtccagcaaccggctgcggggcctgcctgaggatatcagtgccctgcgtgccctcaagatcctctggctgagtggggccgagcttggcacgctgcccgccggcttctgcgagctggccagtttggagagcctcatgctagacaacaacgggctgcaggctctgcccgcccagttcagctgcctgcagcggctcaaaatgctcaacctgtcctccaacctcttcgaggagttccctgccgcgctgctgcccctggctggtctggaggagctctaccttagtcgcaaccagctcacctcggtgccatcccttatctcgggcctgggccggcttctcaccttgtggctggataataaccgcatccgctacctgccggactccatcgtggagctgaccggcctggaggagctcgtgctgcaggggaaccagatcgcggtgctgcccgaccactttggccagctctcccgggtgggtttgtggaagatcaaagacaacccactgatccagcccccctacgaggtctgcatgaaggggatcccctacatcgcagcctaccagaaggaactggctcattcccagccggcggtgcagccccggctcaagctgctcctgatggggcataaggctgcaggaaagactttgctgcgccactgcctcaccgaggagagagtggagggatgcccaggaggaggggacaaggagaagtgctacccaccgtcacctccccctgtgagcaagggcatcgaggtgaccagctggacggccgatgcctcccggggcctgcggttcatcgtgtatgacttagctggggatgaaagttatgaggtgatccagcccttcttcctgtccccaggggccctatacgtgctggtggtcaacttggccacctatgagcctcgccactttcctaccaccgtgggctccttcttgcatcgggtcggggcgagagtgcccaacgcggtggtgtgcatcgtgggcacccacgcagacctgtgcggagagcgtgagctggaggagaaatgtctggacattcaccgccagatcgccctgcaggagaagcacgacgcggagggactgagccgcttggccaaggtggtggacgaggcactggcccgggacttcgagctgcgctctgccagcccccacgcagcctactatggcgtttcggacaagaaccttcgacggcgcaaggcccattttcaatacctgctcaaccaccggctgcagatcctctcccccgtgttgcctgttagctgcagggacccgcgccacttacgacgccttcgggacaagttgctgtcagttgctgagcaccgagagatcttccccaacttacacagagtactgcctcgatcctggcaggtgctggaggaactgcatttccagccacctcaggcccagcgactgtggctaagctggtgggactcggcgcgcttgggcctgcaggcgggtctgaccgaggaccgactgcagagtgccctctcctacctgcatgagagcggcaagctactctactttgaggacagtccggctctcaaggagcacgtcttccacaacctcacccgcctcatcgacatcctcaatgtcttcttccagagggatccctctttgctgctgcataagctgctcctagggaccagtggagagggcaaggcggagggggaaagctccccgcccatggcgcggtccacccccagccaggaactgctccgggccacccagctccatcagtatgtggagggctttctgttgcatgggctcttgccagctcatgtcattcggttgctgcttaagcctcatgtccaggcccagcaggacttgcagctgttgctggagctgctggagaagatgggactctgttactgcctcaataaacccaagggcaagcctttgaatgggtccacagcttggtacaagttcccatgctatgtgcagaacgaggtgccccatgcagaagcctggattaatgggaccaacctagctgggcagtcttttgtggctgagcagttgcagattgaatatagctttccttttacttttccacctgggttgtttgcacgctacagtgtccagatcaacagccatgtggtgcacaggtcggatggtaaatttcagatctttgcctatagagggaaagttcctgtggttgtgagttacagacctgccaggggagtcctgcagccagacaccctgtccattgctagccatgcatcattaccaaatatatggaccgcatggcaagccataacccccttggtggaggaactgaatgtcctacttcaggaatggcctggactgcactacaccgtgcacattctctgttctaagtgccttaagagaggatcgcccaatccacatgcttttccaggggagttgctgagtcagcccagaccggaaggagtggcagagatcatttgccccaagaacggcagcgagcgagtaaatgttgccttggtttacccacccacgccgactgtgatcagcccctgttccaagaagaatgttggtgaaaagcacagaaaccagtga

SEQ ID NO: 199 - DNA, 3243 bp, Homo sapiens
gggcttcgtgttcctgggtgctgaccgtgcactccccgccgcccgaggacttagagctctggaagtagctctccagcttccttcgtactcgggggccggacttgtacacccgcacgaggagcggggacggcgggcgcagaagtgggccaccatatctggaaactacagtctatgctttgaagcgcaaaagggaataaacatttaaagactcccccggggacctggaggatggacttttccatggtggccggagcagcagcttacaatgaaaaatcaggtaggattacctcgctctcactcttgtttcagaaagtctttgctcagatctttcctcagtggagaaaggggaatacagaagaatgtctcccctacaagtgctcagagactggtgctcttggagaaaactatagttggcaaattcccattaaccacaatgacttcaaaattttaaaaaataatgagcgtcagctgtgtgaagtcctccagaataagtttggctgtatctctaccctggtctctccagttcaggaaggcaacagcaaatctctgcaagtgttcagaaaaatgctgactcctaggatagagttatcagtctggaaagatgacctcaccacacatgctgttgatgctgtggtgaatgcagccaatgaagatcttctgcatgggggaggcctggccctggccctggtaaaagctggtggatttgaaatccaagaagagagcaaacagtttgttgccagatatggtaaagtgtcagctggtgagatagctgtcacgggagcagggaggcttccctgcaaacagatcatccatgctgttgggcctcggtggatggaatgggataaacagggatgtactggaaagctgcagagggccattgtaagtattctgaattatgtcatctataaaaatactcacattaagacagtagcaattccagccttgagctctgggatttttcagttccctctgaatttgtgtacaaagactattgtagagactatccgggttagtttgcaagggaagccaatgatgagtaatttgaaagaaattcacctggtgagcaatgaggaccctactgttgctgcctttaaagctgcttcagaattcatcctagggaagagtgagctgggacaagaaaccaccccttctttcaatgcaatggtcgtgaacaacctgaccctccagattgtccagggccacattgaatggcagacggcagatgtaattgttaattctgtaaacccacatgatattacagttggacctgtggcaaagtcaattctacaacaagcaggagttgaaatgaaatcggaatttcttgccacaaaggctaaacagtttcaacggtcccagttggtactggtcacaaaaggatttaacttgttctgtaaatatatataccatgtactgtggcattcagaatttcctaaacctcagatattaaaacatgcaatgaaggagtgtttggaaaaatgcattgagcaaaatataacttccatttcctttcctgcccttgggactggaaacatggaaataaagaaggaaacagcagcagagattttgtttgatgaagttttaacatttgccaaagaccatgtaaaacaccagttaactgtaaaatttgtgatctttccaacagatttggagatatataaggctttcagttctgaaatggcaaagaggtccaagatgctgagtttgaacaattacagtgtcccccagtcaaccagagaggagaaaagagaaaatgggcttgaagctagatctcctgccatcaatctgatgggattcaacgtggaagagatgtgtgaggcccacgcatggatccaaagaatcctgagtctccagaaccaccacatcattgagaataatcatattctgtaccttgggagaaaggaacatgacattttgtctcagcttcagaaaacttcaagtgtctccatcacagaaattatcagcccaggaaggacagagttagagattgaaggagcccgggctgacctcattgaggtggttatgaacattgaagatatgctttgtaaagtacaggaggaaatggcaaggaaaaaggagcgaggcctttggcgctcgttaggacagtggactattcagcaacaaaaaacccaagacgaaatgaaagaaaatatcatatttctgaaatgtcctgtgcctccaactcaagagcttctagatcaaaagaaacagtttgaaaaatgtggtttgcaggttctaaaggtggagaagatagacaatgaggtccttatggctgcctttcaaagaaagaagaaaatgatggaagaaaaactgcacaggcaacctgtgagccataggctgtttcagcaagtcccataccagttctgcaatgtggtatgcagagttggctttcaaagaatgtactcgacaccttgcgatccaaaatacggagctggcatatacttcaccaagaacctcaaaaacctggcagagaaggccaagaaaatctctgctgcagataagctgatctatgtgtttgaggctgaagtactcacaggcttcttctgccagggacatccgttaaatattgttcccccaccactgagtcctggagctatagatggtcatgacagtgtggttgacaatgtctccagccctgaaacctttgttatttttagtggcatgcaggctatacctcagtatttgtggacatgcacccaggaatatgtacagtcacaagattactcatcaggaccaatgagaccctttgcacagcatccttggaggggattcgcaagtggcagccctgttgattaatctctacatcattttaacagctggtatggccttaccttgggtgaactaaccaaataatgaccatcgatggctcaaagagtggcttgaatatatcccatgggttatctgtatggactgactgggttattgaaaggactagccacatactagcatcttagtgcctttatctgtctttatgtcttggggttggggtaggtagataccaaatgaaacactttcaggaccttccttcctcttgcagttgttctttaatctcctttactagaggagataaatattttgcatataatgaagaaatttttctagtatataacgcaggccttttattttctaaaatgatgatagtataaaaatgttaggataacagaatgattttagattttccagagaatattataaagtgctttaggtatgaaaataaatcatctttgtctgattaaaaaaaaaaaa

SEQ ID NO: 200 - DNA, 2283 bp, Homo sapiens; identical to SEQ ID NO: 61

SEQ ID NO: 201 - DNA, 2792 bp, Homo sapiens
aggaagcagacctgcgacgggaccgaggaatggaggggtggtcgggtgtgtggatggccagagtgacagcttagggagaagccggatgtggaaggggaggaactgtgtggtatgcccaggcccctgggcccagccctggcttggcagcccttgctccctgctgagggccctgcctttccttcccctgaaacagctcccggagccctgcctgttccctgtccatccaggccagcagctgaaggagcctcacctgcctcccttctctgagtagcacggatttgaggagaagcagcgaagatgtccagcgagcctccccctccttatcctgggggccccacagccccacttctggaagagaaaagtggagccccgcccaccccaggccgttcctccccagctgtgatgcagccccctccaggcatgccactgccccctgcggacattggccccccaccctatgagccgccgggtcacccaatgccccagcctggcttcatcccaccacacatgagtgcagatggcacctacatgcctccgggtttctaccctcctccaggcccccacccacccatgggctactaccccccagggccctacacgccagggccctaccctggccctgggggccacacagccacagtcctggtcccttcaggagctgccaccacggtgacagtgctgcagggagagatctttgagggagcgcctgtgcagacggtgtgtccccactgccagcaggccatcaccaccaagatctcctacgagattggcttgatgaatttcgtgctgggtttcttctgttgcttcatgggatgtgatctgggctgctgcctgatcccctgcctcatcaatgacttcaaggatgtgacgcacacatgccccagctgcaaagctacatctacacgtacaagcgcctgtgctaacggagctgggactcgggactcccccgcctgtcagtctggccccctgtgctttgctccctgcgctcagtggtcactttcccgctcccacttggggctgggagccgtgccaccatcccctagaagtcctgtcctcttcaccctgccctacctgagccgctgactcttctggcaaaaattctgttgggatttaaggccaagggtcagtgggtggcagggggctggcaatgagcttgtgtgttgttggtctgcttggtgtgtgtgatcgggaagataagctgggaggggtctcctgctggggtcctgatgcctctgtttccaaacaaggtacaggttcagtccagactctttccccctgggaccaacagcagccagagcagttagccagttagtccccaggcctgtggcacaggcgtttctgacctgctgggccgagaatgggtaagttgtctggagtcaggtgggcccacgtaggacagggtcacaaagcctgggtttgtttctgggtactttgcgcctctggggtgctagaggtggggcatggtggctggaagtaaaactgccaactctggccctcagaactctcaggtatagaagcccaggatgtctaataccctgtcccagtgcccgagagctgcctggtgtcaggtagagaggacactgtacctgggtgaatgatcagaccctggtagctaagaaggaacttgtccctttgagtcagtgtgcagaccccctttcaggccatgcgtctgtgaaccctgtattgctggggccggaaggagcccgtgagcctagccccttcccgtctgccctgtgtcctcactgcgtgtgggtatgacctctgcctggtggctggtgtatcccaactggggaagagatggcagagggtcccccttgtgggtgcgcttggatgtgcagagccttctccatggattttcttccctgtaagtgccgggcccctcaccccagctgacaggctgttgctgtgcctgctcacacctgctcctgcaggcacactgggctagggacgaggaaggagcagccacaagtggtagaactgccttggtggacaccagcctcgccctgtctttatttcctgaatggtttgtgaacttgctcacctggaccactgtatcctgccactgtccttcctggtctcgcactgccactgcatggcctcctgtcactgtgaatcgtggcccagtctcagtttgtagtttctcattaaattggccctttcactcccccttggccctttcactcccccgccctgggcctctgctctcttgcctggcttccttcttttttgagggaaagagggtggggctgcaggcagtctactggcaggacgggaggctgagtcctcagggtctcacaccctcagtgctgatgccatgccaactgcctgggacaacaccaacacgtaaggacctaattaaaccaaaccagagtcgggtgtagaccagccctgggatttccagctgtgactgggccagggcacacgttggtctcggcagtggctgtaaggtcaccttccttcctctgatgctggtttcaaccatctatatatggcatccacgcatgggatctgcaagctggagccctcctacccgcaggcttgagcacagcatcatccagccctggggaggcgcacccttaagcaagacagactgggctgaggctgacaggcagaagactaacagagcgcagtctgcacacgcaggttctgggcgacctctggccctggccatctctgcactaactcatctgaattatgaaggtggcagtcttggtcagtagtttaaagagtttccctactttttaaccctttttgaaataaaacttttacaggtaaaaaaaaaaaaaaaaaaa

SEQ ID NO: 202 - DNA, 2946 bp, Homo sapiens
cagcttcccaccctgggctttccgaggtgctttcgccgctgtccccaccactgcagccatgatctccttaacggacacgcagaaaattggaatgggattaacaggatttggagtgtttttcctgttctttggaatgattctcttttttgacaaagcactactggctattggaaatgttttatttgtagccggcttggcttttgtaattggtttagaaagaacattcagattcttcttccaaaaacataaaatgaaagctacaggtttttttctgggtggtgtatttgtagtccttattggttggcctttgataggcatgatcttcgaaatttatggattttttctcttgttcaggggcttctttcctgtcgttgttggctttattagaagagtgccagtccttggatccctcctaaatttacctggaattagatcatttgtagataaagttggagaaagcaacaatatggtataacaacaagtgaatttgaagactcatttaaaatattgtgttatttataaagtcatttgaagaatattcagcacaaaattaaattacatgaaatagcttgtaatgttctttacaggagtttaaaacgtatagcctacaaagtaccagcagcaaattagcaaagaagcagtgaaaacaggcttctactcaagtgaactaagaagaagtcagcaagcaaactgagagaggtgaaatccatgttaatgatgcttaagaaactcttgaaggctatttgtgttgtttttccacaatgtgcgaaactcagccatccttagagaactgtggtgcctgtttcttttctttttattttgaaggctcaggagcatccataggcatttgctttttagaagtgtccactgcaatggcaaaaatatttccagttgcactgtatctctggaagtgatgcatgaattcgattggattgtgtcattttaaagtattaaaaccaaggaaaccccaattttgatgtatggattacttttttttgtaaacatggttaaaataaaacttttgtggttcttctgaatcttaatatttcaaagccaggtgaaaatctgaactagatattctttgttggaatatgcaaaggtcattctttactaacttttagttactaaattatagctaagttttgtcagcagcatactccggaaagtctcatacttcttgggagtctgccctcctaagtatctgtctatatcattcattacgtgtaagtatttaacaaaaaagcattcttgaccatgaatgaagtagtttgtttcatagcttgtctcattgaatagtattattgaagatactaaatgatgcaaaccaaatggattttttccatgtcatgatgtaatttttctttcttctttcttttttttaaattttagcagtggcttattatttgtttttcataaattaaaataacttttgataatgtttactttaagacatgtaacatgttaaaaggttaaacttatggctgtttttaaagggctattcatttaatctgagttttcccttattttcagctttttcctagcatataatagtcattaagcatgacatatccttcatatgatcactcatcttgagttaattagaaaatacctgagttcacgtgctaaagtcatttcactgtaataaactgactatggtttcttaagaacatgacactaaaaaaaaaagtggtttttttccaccgttgctgattattagacagtaggaaatagctgttttctttagttttacaagatgtgacagctttagtggtagatgtagggaaacatttcaacagccatagtactatttgttttaccactgattgcactattttgtttttttaacagttgcaaagctttttaatgcataaaagtataattgaaatctgtggtatttatttacaaacatgtctacaaaaatagattacagcttattttatttttagttaaatctcttaatacacagagaactcccaatcttgctcatctaaataaggaaagacttggtgtatagtgtgatggtttagtcttaaggattaagacatttttggtacttgcatttgacttacgatgtatctgtgaaaatgggatgatattgacaaatggagactcctacctcaatagttaatggaataataagaggctactgttgtgtctaatgttcttcaaaaaagtaatatcctcacttggagagtgtcaaatacatactttgaggattgactttatataaggtgccctgtagaactctgttacacatatttttgacccatattatttacaatgtcttgataattctacctttttagagcaagaatagtatctgctaatgtaagggacatctgtatttaactcctttgtagacatgaatttctatcaaaatgttctttgcactgtaacagagattccttttttcaataatcttaattcaaaagcattattagacttgaaagggtttgataatctcccagtccttagtaaagattgagagaggctggagcagttttcagttttaaatgagtctgcagttaatatcaaatgtgagtttgggactgcctggcaacatttatatttcttattcagaacccttgatgagactatttttaaacatactagtctgctgatagaaagcactatacatcctattgtttctttctttccaaaatcagccttctgtctgtaacaaaaatgtactttatagagatggaggaaaaggtctaatactacatagccttaagtgtttctgtcattgttcaagtgtattttctgtaacagaaacatatttggaatgtttttcttttccccttataaattgtaattcctgaaatactgctgctttaaaaagtcccactgtcagattatattatctaacaattgaatattgtaaatatacttgtcttacctctcaataaaagggtacttttctatcaaaaaaaaaaaaaaaaaaaa

SEQ ID NO: 203 - DNA, 2340 bp, Homo sapiens
gtctgaacctctgccagtcctggagactggtgccctgagctccaaccagcgggcctcatcctacaccctcaccaccgcaacttctcacccgagcaagaagcagctcccagagagaaagaacgttcccacctgcctagccatgggagaggacgctgcacaggccgaaaagttccagcaccctgggtctgacatgcggcaggaaaagccctcgagccccagcccgatgccttcctccacaccaagccccagcctgaacctagggaacacagaggaggccatccgggacaactcacaggtgaacgcagtcacggtgctcacgctcctggacaagctggtgaacatgctagacgctgtgcaggagaaccagcacaagatggagcagcgacagatcagtttggagggctccgtgaagggcatccagaatgacctcaccaagctctccaagtaccaggcctccaccagcaacacggtgagcaagctgctggagaagtcccgcaaggtcagcgcccacacgcgcgcggtcaaagagcgcatggataggcagtgcgcacaggtgaagcggctggagaacaaccacgcccagctcctccgacgcaaccatttcaaagtgctcatcttccaggaggaaaatgagatccctgccagcgtgtttgtgaaacagcccgtttccggtgccgtggaagggaaggaggagcttccggatgaaaacaaatccctggaggaaaccctgcacaccgtggacctctcctcagatgatgatttgccccacgatgaggaggccctggaagacagtgccgaggaaaaggtggaagaaagtagggcagagaaaataaaaagatccagcctgaagaaagtggatagcctcaagaaagcattttctcgccagaacatcgagaaaaagatgaacaagctggggacaaagatcgtatctgtagagaggagagagaagattaagaaatctctcacgtcaaatcaccagaaaatatcctcaggaaaaagctcccccttcaaggtttctcccctcactttcgggcggaagaaagtccgagagggagaaagccatgcagaaaatgagaccaagtcagaagacctgcctagcagtgagcagatgccaaatgaccaggaagaggagtcctttgcagagggtcattccgaagcgtccctcgccagcgctctggtggaaggggaaattgcagaggaggctgctgagaaggcgacctccagggggagtaactcggggatggacagcaacatcgacttgactattgtggaagatgaagaggaggagtcagtggccctggaacaggcacagaaggtacgctatgagggtagctacgcgctaacatccgaggaggcggagcgctccgatggggaccccgtgcagcccgccgtgctccaggtgcaccagacctcctgagcttagagccaccgtgccatcctgtgctgtgctcaagcgggcagccagggctgaagaacaaactcttgcacatctccagcacgactcacccactcctgcgttcctgtccaggcagtaatcattgaccatatagtcatagtaagacacacgagaccaggctttaccatgaaagcgacctgtcacggactccacttttaatttgctcttaggttctatctctgtagaatgtctccaagattgaagaagaaactgagcagttgaaaaatgctaatctctttgacttagtcagaaaaaaacagaggataattaagatactagtcatgaaaagtgattcattcttttttgtcattccataagcttgctgaatagtgtaccggtaatatattgtatttccaccgtactctgtgaatctaattattattctttaagtgttgatatataatatacataaatatgtaagctaaacatataactatatgttttaagaagaaaacatctacgaaaggtaaaaagagatgatcagttggttgtttacttgctagaaaccattgttttattgcaaacgaaggaaaaatgaagagattataaaagtcagctaatgaagtaagatacgtagtaaagtcaggactattcaaaaagtaagaaagaaaatttggaaaatgagagaaacaggaaacaaagaatgccgaaaagaatgaaaacagagaaaaaatgtatgtgcttgaaagtaaaatacttacaatagtagcttaactatttcactctttaaataaaaatactaaagaagttcgtatatcctggaataacatgtcatcttcaaaatatttttattttctaatatttttaataataaacattttatagtgttaaagctgtatttttcttaataaataaaggacattacaaataaaaaaaaaaaaaaa

SEQ ID NO: 204 - DNA, 1361 bp, Homo sapiens
ggggaggtagcccgcagtgcaggggcagcgcggcgcggggccaccgacgggacgcggctccgggaacatggctcgcttcgctctgactgttgtccggcatggagaaacaagatttaacaaggagaaaataatccaaggacaaggagtagatgaacctctttcagaaactggatttaaacaagcagcagctgctggtatatttctgaataatgtgaagtttactcatgctttctccagtgatctcatgaggacaaagcagaccatgcatggaattttggagagaagcaaattttgcaaagatatgacggtaaagtatgactcaagacttcgggaaaggaaatacggggttgtagaaggcaaagcgctaagtgagctgagggccatggccaaagcagccagggaagagtgccctgtgtttacaccgcccggaggagagacgctggaccaggtgaaaatgcgtggaatagacttttttgaatttctttgtcaactaatcctgaaagaagcggatcaaaaagaacagttttcccaaggatctccaagcaactgtctggaaacttctttggcagagatatttcctttaggaaaaaatcacagctctaaagttaattcagacagcggtattccaggattagcagccagtgtcttagttgtgagtcacggtgcttacatgagaagtctgtttgattattttctgactgaccttaagtgttccttaccagccactctgagcagatctgaacttatgtcagtcactcccaatacagggatgagtctctttatcataaactttgaggaaggaagagaagttaaaccaacggttcagtgtatttgtatgaacctacaggatcatctaaatggactgactgaaactcgctaaggttaaatctgcatcaaaatctaaccaatttgagcctctgaagggagtgccattggctttatttacttctctcctctgctagtcctgatttggaaacagttaaaagccaatttttagctccagtggaaccatagccacataaaactttaatggacaaccatatagaattaacttattttgtccaagtacagttggcattttccagaataattttaccaccctgctagatgtcatctctggattgcacatggatgatgaaggaactcagcattgaaagttgggggattagtaaccttgttacaacggtttctttttcattttagcctattttaatggctattggtaagatactgtatgtttttagtatctcatccagtgcttagaagaaagaatggtttataattcccagtacatgtttatattgactgtgttatatttttaaatcctttaaataaaaaatccttataagtttatgtaaagc

SEQ ID NO: 205 - DNA, 3113 bp, Homo sapiens
ccggaatgaaaacaaacggcggccgctgccgcatccgggcactctgctggtcgcggcgggagtggcgtggcgcagggatggcacaaaagaaatatcttcaagcaaaattgacccagtttttaagggaagacaggattcaactttggaaacctccatatacagatgaaaataaaaaagttggtttggcattaaaggaccttgctaagcagtactctgacagactagaatgctgtgaaaatgaagtagaaaaggtaatagaagaaatacgttgcaaggcaattgagcgtggaacaggaaatgacaattatagaacaacgggaattgctacaatcgaggtgtttttaccaccaagactaaaaaaagataggaaaaacttgttggagacccgattgcacatcactggcagagaactgaggtccaaaatagctgaaacctttggacttcaagaaaattatatcaaaattgtcataaataagaagcaactacaactagggaaaacccttgaagaacaaggcgtggctcacaatgtgaaagcgatggtgcttgaactaaaacaatctgaagaggacgcgaggaaaaacttccagttagaggaagaggagcaaaatgaggccaaactcaaagaaaaacaaattcagaggaccaagagaggactagaaatactggcaaagagagcagcagagacagtggtggatccagaaatgacaccgtacttagacatagctaaccagacaggcagatcaatcagaattcccccatcagaaagaaaagcccttatgttagctatgggatatcatgagaagggcagagctttcctgaaaagaaaagaatatggaatagccttgccatgtctgttggacgctgacaaatatttctgtgagtgttgcagagagctgctggacacagtggataactatgccgtcctccagctggatatagtgtggtgttacttccgcctggaacagctggaatgccttgatgatgcagaaaaaaaattaaacttggcccagaaatgctttaaaaattgttacggagaaaatcatcagagactggtccacataaaaggaaattgtgggaaagagaaggtactgtttctaagactctacttacttcaagggatccgaaactatcacagtggaaatgatgtagaggcttatgagtatcttaacaaggcacgtcagctctttaaagagctatatattgatccatcaaaagtggacaatttgttgcagttggggtttactgcccaggaagcccggcttggcctgagggcgtgtgatgggaacgtggatcatgcggccactcatattaccaaccgcagagaggaactggcccaaataaggaaggaggaaaaagagaagaaaagacgccgcctcgagaacatcaggtttctgaaagggatgggctactccacgcacgcggcccagcagattctgctcagcaatcctcagatgtggtggttaaatgattccaatcctgaaaccgacaaccgtcaagaaagtccttcccaggaaaacattgaccgattggtgtacatgggttttgatgcactcgtggccgaagctgcgctgagagtgttcagaggcaacgtccagctggccgcccagacccttgctcacaacggaggaagcctgcctcccgagctgccgctgtcgccagaagactctttgtccccgccagccacgtccccttctgactccgcaggaacctctagtgcctcaacagacgaagacatggagacagaggccgtcaatgagatactggaagacattccagagcatgaggaagactatcttgactcaactctggaagatgaagaaattattattgcagagtacctatcctatgtagaaaataggaagtcagcaacaaagaaaaactaaataatgaacagaaatagcgctaattttctgcttataaatgctatcattatgaaaaggctaatgcagctctttctgttcttactttttatctgaattacaagtcctctttgggtgtaggagggggtgggcaggggacaagtccaggaggggtcccagggccttcatgcatggtctcggggaagaagcttcctctggcctggcgcaggccgttccatctgcctcccaggtctgcgtcccataaccctttccccagcttggtgttttaccccgaaacaggaaggaacaggggtcctgtagaacaggggtcctggggaaggtgtccagggcagggtcctgggaagggtgtcccgactgcttcctctccagctgtggctccatctgcccagcttgcctgcctcctgcacccactgccctgaccttcctgcttcccacgctgccatctctgccagggtgccacatgggttcctgtgccaccctttccccgcccctcaaatcgtcctttaagtcttccttccaagtgctgtggggcataacgatgaggcgctggccttgggggccacaccaggtcgcagcaaatggcttcagcctgggacgccagtgttttatgctcttagttcagtaaaatacgcccccgaaattcaagattgagtgtcaggctttatatatattcagcattcctcattacagaaatcttctattgaatgggaaaggtttaaatgctaaccaaagcaatttatttttaattaatatttttagactctgtgctgtcatactgaactcactgctagctaagagacctatcagagatttagatatattttctccaggttttttgtgggttttctttgttgttgttgttgttctagccatgtgacagaggctctttctaaaagtatgtagttcgctgtgtgtcggctccagcagtaaccgtcctcactgcgccacgcactcctctgtagatgtgtgcccagtgggagttccttccagccccaggaccgcagcagcagccaggtgccgagtggattgagtgccaggtgcatccaagactttccctcccttccagaaggcactgactgaagacaggatggatcatgcggagccggctgaaatgctccaactttttcaaagtgtgggtggtccagtttggactgatgggaatcttcttgtcattctttttaaacggatgataccgatggaaataaaaggtgggaaatatattcaaaaaaaaaa

SEQ ID NO: 206 - DNA, 1109 bp, Homo sapiens
gggctccgctggctgcggtcgcctgggagctgccgccagggccaggaggggagcggcacctggaagatgcgcccattggctggtggttcacgttgggcatgctggctcacaaggtgcttgattagctgctttgacataaacgttcaaggacgtttgttggttaagttaagacctaaaccaacagcaaatacaacttgccctggcctgctcaaggtggtgttcgtggtcttcgcctccttgtgtgcctggtattcggggtacctgctcgcagagctcattccagatgcacccctgtccagtgctgcctatagcatccgcagcatcggggagaggcctgtcctcaaagctccagtccccaaaaggcaaaaatgtgaccactggactccctgcccatctgacacctatgcctacaggttactcagcggaggtggcagaagcaagtacgccaaaatctgctttgaggataacctacttatgggagaacagctgggaaatgttgccagaggaataaacattgccattgtcaactatgtaactgggaatgtgacagcaacacgatgttttgatatgtatgaaggcgataactctggaccgatgacaaagtttattcagagtgctgctccaaaatccctgctcttcatggtgacctatgacgacggaagcacaagactgaataacgatgccaagaatgccatagaagcacttggaagtaaagaaatcaggaacatgaaattcaggtctagctgggtatttattgcagcaaaaggcttggaactcccttccgaaattcagagagaaaagatcaaccactctgatgctaagaacaacagatattctggctggcctgcagagatccagatagaaggctgcatacccaaagaacgaagctgacactgcagggtcctgagtaaatgtgttctgtataaacaaatgcagctggaatcgctcaagaatcttatttttctaaatccaacagcccatatttgatgagtattttgggtttgttgtaaaccaatgaacatttgctagttgtatcaaatcttggtacgcagtatttttataccagtattttatgtagtgaagatgtcaattagcaggaaactaaaatg

SEQ ID NO: 207 - DNA, 448 bp, Homo sapiens
tttttttttttttttcctgaatataagcaatttattctgattactgataaaataacattcacattcaagcctacaaatctgagaaatcattattccatatgcacagaaggccacagtcagtagtctaatagtactgcttaccagggtagggtaaacttctttcaaaatcagggaacaattctagatcagccatggggagaaataagtgctcttctcttaggccagcgacacttccgatgggtcttgacatcccacctatgggctggtgtgtgaaactctcatctctacgtccctccccagttttaagagtcaccatgtcacataaaagctccagcatcagccaggcacggcggctcatgcctataatcccaacactttgggtggccaaggcaggtggatcacgaggtcaggagttcaagaccagcctggccaacatagcgaaaccttg

SEQ ID NO: 208 - DNA, 2329 bp, Homo sapiens
atggaggcgaccggcacctgggcgctgctgctggcgctggcgctgctcctgctgctgacgctggcgctgtccgggaccagggcccgaggccacctgccccccgggcccacgccgctaccactgctgggaaacctcctgcagctacggcccggggcgctgtattcagggctcatgcggctgagtaagaagtacggaccggtgttcaccatctacctgggaccctggcggcctgtggtggtcctggttgggcaggaggctgtgcgggaggccctgggaggtcaggctgaggagttcagcggccggggaaccgtagcgatgctggaagggacttttgatggccatggggttttcttctccaacggggagcggtggaggcagctgaggaagtttaccatgcttgctctgcgggacctgggcatggggaagcgagaaggcgaggagctgatccaggcggaggcccggtgtctggtggagacattccaggggacagaaggacgcccattcgatccctccctgctgctggcccaggccacctccaacgtagtctgctccctcctctttggcctccgcttctcctatgaggataaggagttccaggccgtggtccgggcagctggtggtaccctgctgggagtcagctcccaggggggtcagacctacgagatgttctcctggttcctgcggcccctgccaggcccccacaagcagctcctccaccacgtcagcaccttggctgccttcacagtccggcaggtgcagcagcaccaggggaacctggatgcttcgggccccgcacgtgaccttgtcgatgccttcctgctgaagatggcacaggaggaacaaaacccaggcacagaattcaccaacaagaacatgctgatgacagtcatttatttgctgtttgctgggacgatgacggtcagcaccacggtcggctataccctcctgctcctgatgaaataccctcatgtccaaaagtgggtacgtgaggagctgaatcgggagctgggggctggccaggcaccaagcctaggggaccgtacccgcctcccttacaccgacgcggttctgcatgaggcgcagcggctgctggcgctggtgcccatgggaataccccgcaccctcatgcggaccacccgcttccgagggtacaccctgccccagggcacggaggtcttccccctccttggctccatcctgcatgaccccaacatcttcaagcacccagaagagttcaacccagaccgtttcctggatgcagatggacggttcaggaagcatgaggcgttcctgcccttctccttagggaagcgtgtctgccttggagagggcctggcaaaagcggagctcttcctcttcttcaccaccatcctacaagccttctccctggagagcccgtgcccgccggacaccctgagcctcaagcccaccgtcagtggccttttcaacattcccccagccttccagctgcaagtccgtcccactgaccttcactccaccacgcagaccagatgaaggaaggcaacttggaagtggtgggtgcccaggacggtgcctccagcctcaacagtgggcatggacagggttaatgtctccagagtgtacactgcaggcagccacatttacacgcctgcagttgttttccggagtctgtcccacggcccacacgctcacttgactcatgctgctaagatgcacaaccgcacacccatacacaactacaagggccacaaagcaactgctgggttagctttccacagacataaatatagtccatctgcaatcacaagcacatagccaggtaacccaccaactcccctggatctgcagcccacacgtgggagtctggctgtcaccttcacaagccacagaaacggccacacatgttcacagctcacacgccctctccattcatcgaacttctcagtgtccctgtccctggtgcctggcacagggaacagcatgccccctccggggtcatgccacccagagactgtcgctgtctatggccccaactcatgctccctctcttggctacaccactctcccagcctgtgaccaccgatgtccacacacccccaaccacttgtccacacagctacccacgtacgacatcgtcctggctccccagagtatcttcccactgagacacgccgcccccacagaggcacagtccccagccacctctgcaactgcagccctcagtcacccctttttaagcaccctgattctaccaaatgcaaacacatctgggtctgcgattatgcacagagactttggacatacgaggaccctcagaccggaggaacacctgcccaaccccaacacg

SEQ ID NO: 209 - DNA, 1216 bp, Homo sapiens; identical to SEQ ID NO: 121

SEQ ID NO: 210 - DNA, 685 bp, Homo sapiens
tttttttttttttttttttttttttttaagtttaaattcattttaagtttgctatattaaatttaaaaattaaaaaaatatcaacttactataaacaatttaaaatatgtataatacaacttcatggtcaaaacatttgaatagtctatgaaaacaggaaatacgttcatctgacatttctgtttagattccattcatgatttttcaatctgtctcttccaaaagaaaccataaagcagttgtcatattttatggcaactaattttgtttagggatttcctcatcacaaaaatactttatttcctattacaggggagttaaagaagaagaaaaaagaaatgagaaacaaagtggctttctccccacttgtcactattctcttcttcaaacattctgtacataagctgtctgagtcttttgaaccatttacaaattgtattttcagaaattgaagaaaaaatatttagagtctaaaagtgttattttatacactgactatccaatatacattgaatgtttacacatacaatacatcttaaagataaggtcttcaaagggttttcgaacatccatcacacatgtacttggtgggctatcacaggttgtgtgtactcctgacttgactaggtgtgagacgatcgtatgccatcttgtactcttgatcaaaagcatctatatcgatgtt

SEQ ID NO: 211 - DNA, 1924 bp, Homo sapiens
cgcccgggcaggttagaattcagcgaccgcttaattctaggctcagtcccgacgtggaactcagcagcggaggctggacgcttgcatggcgcttgagagattccatcgtgcctggctcacataagcgcttcctggaagtgaagtcgtgctgtcctgaacgcgggccaggcagctgcggcctgggggttttggagtgatcacgaatgagcaaggcgtttgggctcctgaggcaaatctgtcagtccatcctggctgagtcctcgcagtccccggcagatcttgaagaaaagaaggaagaagacagcaacatgaagagagagcagcccagagagcgtcccagggcctgggactaccctcatggcctggttggtttacacaacattggacagacctgctgccttaactccttgattcaggtgttcgtaatgaatgtggacttcaccaggatattgaagaggatcacggtgcccaggggagctgacgagcagaggagaagcgtccctttccagatgcttctgctgctggagaagatgcaggacagccggcagaaagcagtgcggcccctggagctggcctactgcctgcagaagtgcaacgtgcccttgtttgtccaacatgatgctgcccaactgtacctcaaactctggaacctgattaaggaccagatcactgatgtgcacttggtggagagactgcaggccctgtatacgatccgggtgaaggactccttgatttgcgttgactgtgccatggagagtagcagaaacagcagcatgctcaccctcccactttctctttttgatgtggactcaaagcccctgaagacactggaggacgccctgcactgcttcttccagcccagggagttatcaagcaaaagcaagtgcttctgtgagaactgtgggaagaagacccgtgggaaacaggtcttgaagctgacccatttgccccagaccctgacaatccacctcatgcgattctccatcaggaattcacagacgagaaagatctgccactccctgtacttcccccagagcttggatttcagccagatccttccaatgaagcgagagtcttgtgatgctgaggagcagtctggagggcagtatgagctttttgctgtgattgcgcacgtgggaatggcagactccggtcattactgtgtctacatccggaatgctgtggatggaaaatggtcttgcttcaatgactccaatatttgcttggtgtcctgggaagacatccagtgtacctacggaaatcctaactaccactggcaggaaactgcatatcttctggtttacatgaagatggagtgctaatggaaatgcccaaaaccttcagagattgacacgctgtcattttccatttccgttcctggatctacggagtcttctaagagattttgcaatgaggagaagcattgttttcaaactatataactgaccttatttataattagggatattatcaaaatatgtaaccatgaggcccctcaggtcctgatcagtcagaatggatgctttcaccagcagacccggccatgtggctgctcggtcctgggtgctcgctgctgtgcaagacattagccctttagttatgagcctgtgggaacttcaggggttcccagtggggagagcagtggcagtgggaggcatctgggggccaaaggtcagtggcagggggtatttcagtattatacaactgctgtgaccagacttgtatactggctgaatatcagtgctgtttgtaatttttcactttgagaaccaacattaattccatatgaatcaagtgttttgtaactgctattcatttattcagcaaatatttattgagcatctcttctccataagatagtgtgataaacacggtcatgaataaagttattttccccgaaaaaaaaaaaaaaaaaaaaaaaaaa

SEQ ID NO: 212 - DNA, 2192 bp, Homo sapiens
tccctgtcctgcgcccgcgcgccccgggagcctacccagcacgcgctccgcgcccactggttccctccagccgccgccgtccagccgagtccccactccggagtcgccgctgccgcggggacatggtcctctgcgttcaggggtgagcacccccttgtaagctcagggctactgttgggtgtcagggaacaaagttttagactgctgcgctccaaagcgggcacacacatgtacctagaacacaccagccactgtccccaccatgatgatgacacagccatggacacacccctgcccagacctcgtcctttgctggctgtggagcggactgggcagcggcccctgtgggccccgtccctggaactgcccaagccagtcatgcagcccttgcctgctggggccttcctcgaggaggtggcagagggtaccccagcccagacagagagtgagccaaaggtgctggacccagaggaggatctgctgtgcatagccaagaccttctcctaccttcgggaatctggctggtattggggttccattacggccagcgaggcccgacaacacctgcagaagatgccagaaggcacgttcttagtacgtgacagcacgcaccccagctacctgttcacgctgtcagtgaaaaccactcgtggccccaccaatgtacgcattgagtatgccgactccagcttccgtctggactccaactgcttgtccaggccacgcatcctggcctttccggatgtggtcagccttgtgcagcactatgtggcctcctgcactgctgatacccgaagcgacagccccgatcctgctcccaccccggccctgcctatgcctaaggaggatgcgcctagtgacccagcactgcctgctcctccaccagccactgctgtacacctaaaactggtgcagccctttgtacgcagaagcagtgcccgcagcctgcaacacctgtgccgccttgtcatcaaccgtctggtggccgacgtggactgcctgccactgccccggcgcatggccgactacctccgacagtaccccttccagctctgactgtacggggcaatctgcccaccctcacccagtcgcaccctggaggggacatcagccccagctggacttgggcccccactgtccctcctccaggcatcctggtgcctgcatacctctggcagctggcccaggaagagccagcaagagcaaggcatgggagaggggaggtgtcacacaacttggaggtaaatgcccccaggccgcatgtggcttcattatactgagccatgtgtcagaggatggggagacaggcaggaccttgtctcacctgtgggctgggcccagacctccactcgcttgcctgccctggccacctgaactgtatgggcactctcagccctggtttttcaatccccagggtcgggtaggacccctactggcagccagcctctgtttctgggaggatgacatgcagaggaactgagatcgacagtgactagtgaccccttgttgaggggtaagccaggctaggggactgcacaattatacactatttatttatttattctccttggggttggtgtcaggggcgagccaaccccacctctatgccctgagccctggtagtccagagaccccaactctgccctggcttctctggttcttccctgtggaaagcccatcctgagacatcttgctggaaccaaggcaatcctggatgtcctggtactgacccacccgtctgtgaatgtgtccactctcttctgcccccagccatatttggggaggatggacaactacaataggtaagaaaatgcagccggagcctcagtccccagcagagcctgtgtctcaccccctcacaggacagagctgtatctgcatagagctggtctcactgtggcgcaggccccggggggagtgcctgtgctgtcaggaagagggggtgctggtttgagggccaccactgcagttctgctaggtctgcttcctgcccaggaaggtgcctgcacatgagaggagagaaatacacgtctgataagacttcatgaaataataattatagcaaagaacagtttggtggtcttttctcttccactgatttttctgtaatgacattatacctttattacctctttattttattacctctataataaaatgatacctttttcatgtaaaaaaaaaaaaaaaaa

SEQ ID NO: 213 - DNA, 3583 bp, Homo sapiens
aactttaattgccaagatttcacccctcctcctcaagcccagattatttatcctccctccggcctgggctgctggatgcagcagcggctgggcttggtcccaggagcagggagagtgcgctcccggccctcctagccgcgtgcccgggccatggtgcggctgagccccgcgcttgggtgaggcggcggcgcggctcggagcccggcggaccggtcctacgggacatcttcccctgaggaggagtcttcccctggggctgcgtgccgggggcgagcggcggccgcgatgttcagctggctgggtacggacgaccgccggaggaaggaccccgaggttttccagacggtgagtgaggggctcaagaaactctacaagagcaagctgctgcccttggaagagcattaccgcttccacgagttccactcgcccgccctggaggatgccgacttcgacaacaagcccatggttctgctggtgggccagtactccactgggaagaccaccttcatcaggtacctgctggaacaggacttcccaggcatgaggattgggcctgagcccaccacagactccttcattgcggtgatgcagggagacatggaggggatcatccctgggaacgccctggtggtggatcccaagaaacccttcaggaaactcaacgcctttggcaacgccttcttgaacaggttcgtgtgtgcccagctacctaaccctgtgctggagagcatcagcgtcatcgacacaccagggatcctctctggggagaagcagaggatcagccgggggtatgactttgcagctgtccttgagtggtttgccgagcgggttgaccgcatcattctgctcttcgatgcccacaaactggacatctctgatgagttctcagaagtcatcaaagccctcaagaaccacgaggacaagatgcgagtggtgctgaacaaagctgaccagatcgagacgcagcagctgatgcgggtgtacggggccctcatgtggtccttggggaagatcgtgaacaccccagaggtgatccgggtctacatcggctccttctggtcccaccccctcctcatccctgacaaccggaagctctttgaggctgaggaacaggacctattcagggacatccagagtctgccccgaaatgctgccctgcgcaagctcaacgacctcatcaaaagggccaggctggccaaggtccacgcctacatcatcagctctctgaagaaggagatgccctcggtgttcgggaaggacaacaagaagaaggagctggtcaacaacctggccgagatctatggccggatcgagcgggagcaccagatctcacctggggacttccccaatctgaagaggatgcaggaccagctgcaggcccaggactttagcaagttccagccgctgaagagcaagctgctggaggtagtggacgacatgctggcccatgacattgcccagctcatggtgctagtgcgccaggaggagtcacagcggcccatccagatggtgaagggcggagcgttcgagggcaccctgcacggcccctttgggcatggctatggggagggggctggagaaggtatcgatgatgctgagtgggtggtggccagggacaagcccatgtacgacgagatcttctacaccctgtcaccggtggatggcaagatcacaggcgctaatgccaagaaggagatggtgcgctccaagctgcccaacagtgtgctgggcaagatctggaagctggccgacattgacaaggatggcatgctggacgacgacgagtttgcactggccaaccacctcatcaaagtcaagctggaggggcacgagctgcccaacgagctgcctgcccacctcctgcccccgtccaagaggaaagttgccgagtgatggggtggggggacattcagacgggcagtgttagaggaggagatgggagcggtgactacacacacacacacacacacacacacacacacaaacatgcacacacacatatgcatatcttgacattgctctgtaggtgagagaggaccatgacgcccatgtttgcagctgatacttgtttgggcacacctccaagttctcgggattagaaggacaagagcactcccaggccccagagtctaagcctaagtctctatcgctcttcccctctcctcggccactccccagataccagacctgaggcaattcacttgccagcacagatggccaacccacctccagattccccagtgcttccacacccgggctctgagcaaatggaaaagacttttcatttagtagacaattcacttctttttctgtgcttcccctatctgctttggcttcctaataagaaatccattcaagagctaggagatctgagggcaggcgggcagctgcagggaggagaggtgagaaaggaagcgtcttctagagacattggcccaggagctctgttctttcctaatctaagcctctgtcttcttcggcaaaccttgctttgaactctgccagtatttcattttaaagaatcccagagcgggagagagaagagaaaaaaattgataagagtgaggaaattgtcctgtagtctattgaaaaccagtcaaggtggttttagttcatagattttgttagatgttctttccacctggcctatgatgtttagatgttcatacttgactcacatttacccagcccctcctgcgtaccaggagctgtgttaggcactttatatacattattctatgtggccctcactgatgccccagggaagtatgcattagccttcccattttgcagttgaggaggctgagtagcctcagaagggtttaggcgaccttctgaaactcacagaagtcacgtgatggagagaggattcaaagccagggcctcagaccctcacacacttgtctgtgctatgatgtatgcaggatcccagcattgatacccaatgacaaactatggagaacaagcaaagtatgcaggccccctgcagcctcccaggacaggctggcaagggaggagggccggccagcatttggtggcccatcagtctggccatctgtcacgtcacagaagcaaaccgtgccttctggctctgcgccccatattcccagcatcatagacatccaacagcaccagcaggagagtgggctagcctgctggatgctgttcgtgcctgtccctgctctgcctcccacccagttgcctgaatcatcccagctcagatgcagccactgtctcttgtcaagtgggacctcatactattctcagaaggctaacttgagaggtttggggccttgttccccagagggtccccagggactctgcagtgtccttggcaaatccccactgtactcaatgccctacattctcttctgtggtctctcccctggcttgcttcatggccactgaaccaatcactttgtatgctatgctcctactgtgatggaaaacaaaatgagtataacttattttatatccatattcagactatatagagaatattctatgcatctatgacgtgcttactactgcagtgcatttgtcattagtcttcatgttaatacagtacatttattctttggta

SEQ ID NO: 214 - DNA, 512 bp, Homo sapiens
tttaaaactaaaattggttttaataaaagttttggagtcatctaaatgagtaactatacacattcctcctctccagcaagtatacagaaatcttcccttactccaatttgacgctgcaaaatcatacatgcaccccaaactgatctgttattgaaatttctttttctggtctcacccattactttaacatatcagaggaattaacataacagcctagagaacagaaataagagataataggtgcttcagtaccacccaaattatctactaagaccacagtgtggcaacagaatgcagattcatggtagtagttccttgaatgaaagagttcagacagaatcttccacaaacacaaatttttgcggtatccaaatcttggcagagatggaatggaatgatatgagagccatatggaatccttacttagacagatatccacaggaggctcctttaaccgaacagtggctttcccctcatctacaaatttggtgaagaattgctcaatgttctcc

SEQ ID NO: 215 - DNA, 2007 bp, Homo sapiens
agcggagggggaaatcctgagcgcaggccagggttgtttggttttgaggtgtgctgggatgaaaggcaccctggaagtggaaggtaaatgagcaatggaaaaacttcacggcaagattagaaagatacctgagcccaatacccgcctgatgtcgtgggccacacctccgggttaccaggggaagggaggaagcaaactgtcatattgatgtggctctaaacaacaacagtgtgcgaaggcccaggggcactttgggattgaccaagaggaaacacaagttgcacaatgatacaatcttgttggtacaattgtcagagaagggaactcccacagcaaaggccataaaaccatccagggcagtctggggcggctcagttctgcggtgccagggagtggagcagagctcagccccgtcccaaacacagatgggaccatgaactccggacacagcttcagccagaccccctcggcctccttccatggcgccggaggtggctggggccggcccaggagcttccccagggctcccaccgtccatggcggtgcggggggagcccgcatctccctgtccttcaccacgcggagctgcccaccccctggagggtcttggggttctggaagaagcagccccctactaggcggaaatgggaaggccaccatgcagaatctcaacgaccgcctggcctcctacgtggagaaggttcgcgccctggaggaggccaacatgaagctggaaagccgcatcctgaaatggcaccagcagagagatcctggcagtaagaaagattattcacagtatgaggaaaacatcacacacctgcaggagcagatagtggatggtaagatgaccaatgctcagattattcttctcattgacaatgccaggatggcagtggatgacttcaacctcaagtatgaaaatgaacactcctttaagaaagacttggaaattgaagtcgagggcctccgaaggaccttagacaacctgaccattgtcacaacagacctagaacaggaggtggaaggaatgaggaaagagctcattctcatgaagaagcaccatgagcaggaaatggagaagcatcatgtgccaagtgacttcaatgtcaatgtgaaggtggatacgggtcccagggaagatctgattaaggtcctggaggatatgagacaagaatatgagcttataataaagaagaagcatcgagacttggacacttggtataaagaacagtctgcagccatgtcccaggaggcagccagtccagccactgtgcagagcagacaaggtgacatccacgaactgaagcgcacattccaggccctggagattgacctgcagacacagtacagcacgaaatctgctttggaaaacatgttatccgagacccagtctcggtactcctgcaagctccaggacatgcaagagatcatctcccactatgaggaggaactgacgcagctacgccatgaactggagcggcagaacaatgaataccaagtgctgctgggcatcaaaacccacctggagaaggaaatcaccacgtaccgacggctcctggagggagagagtgaagggacacgggaagaatcaaagtcgagcatgaaagtgtttgcaactccaaagatcaaggccataacccaggagaccatcaacggaagattagttctttgtcaagtgaatgaaatccaaaagcacgcatgagaccaatgaaagtttccgcctgttgtaaaatctattttcccccaaggaaagtccttgcacagacaccagtgagtgagttctaaaagatacccttggaattatcagactcagaaacttttattttttttttctgtaactgtctcaccagacttctcataatgctcttaatatattgcacttttctaatcaaagtgcgagtttatgagggtaaagctctactttcctactgcagccttcagattctcatcattttgcatctattttgtagccaataaaactccgcactagcaaaaaaaaaaaaaaaa

SEQ ID NO: 216 - DNA, 1890 bp, Homo sapiens; identical to SEQ ID NO: 142

SEQ ID NO: 217 - DNA, 1816 bp, Homo sapiens; identical to SEQ ID NO: 143

SEQ ID NO: 218 - DNA, 1646 bp, Homo sapiens; identical to SEQ ID NO: 144

SEQ ID NO: 219 - DNA, 1940 bp, Homo sapiens; identical to SEQ ID NO: 145

SEQ ID NO: 220 - DNA, 1953 bp, Homo sapiens
cgctcccacccgcccgtggcccgcgcccatggccgcgcgcgctccacacaactcaccggagtccgcgccctgcgccgccgaccagttcgcagctccgcgccacggcagccagtctcacctggcggcaccgcccgcccaccgccccggccacagcccctgcgcccacggcagcaatcgaggcgaccgcgacagtggtgggggacgctgctgagtggaagagagcgcagcccggccaccggacctacttactcgccttgctgattgtctatttttgcgtttacaacttttctaagaacttttgtatacaaaggaactttttaaaaaagacgcttccaagttatatttaatccaaagaagaaggatctcggccaatttggggttttgggttttggcttcgttttttctcttcgttgactttggggttcaggtgccccagctgcttcgggctgccgaggaccttctgggcccccacattaatgaggcagccacctggcgagtctgacatggctgtcagcgacgcgctgctcccatctttctccacgttcgcgtctggcccggcgggaagggagaagacactgcgtcaagcaggtgccccgaataaccgctggcgggaggagctctcccacatgaagcgacttcccccagtgcttcccggccgcccctatgacctggcggcggcgaccgtggccacagacctggagagcggcggagccggtgcggcttgcggcggtagcaacctggcgcccctacctcggagagagaccgaggagttcaacgatctcctggacctggactttattctctccaattcgctgacccatcctccggagtcagtggccgccaccgtgtcctcgtcagcgtcagcctcctcttcgtcgtcgccgtcgagcagcggccctgccagcgcgccctccacctgcagcttcacctatccgatccgggccgggaacgacccgggcgtggcgccgggcggcacgggcggaggcctcctctatggcagggagtccgctccccctccgacggctcccttcaacctggcggacatcaacgacgtgagcccctcgggcggcttcgtggccgagctcctgcggccagaattggacccggtgtacattccgccgcagcagccgcagccgccaggtggcgggctgatgggcaagttcgtgctgaaggcgtcgctgagcgcccctggcagcgagtacggcagcccgtcggtcatcagcgtcagcaaaggcagccctgacggcagccacccggtggtggtggcgccctacaacggcgggccgccgcgcacgtgccccaagatcaagcaggaggcggtctcttcgtgcacccacttgggcgctggaccccctctcagcaatggccaccggccggctgcacacaacttccccctggggcggcagctccccagcaggagtaccccgaccctgggttttgaggaagtgctgagcagcagggaatgtcaccctgccctgccgcttcctcccggcttccatccccacccggggcccaattacccatccttcctgcccgatcagatgcagccgcaagtcccgccgctccattaccaagagctcatgccacccggttcctgcatgccagaggagcccaagccaaagaggggaagacgatcgtggccccggaaaaggaccgccacccacacttgtgattacgcgggctgcggcaaaacctacacaaagagttcccatctcaaggcacacctgcgaacccacacaggtgagaaaccttaccactgtgactgggacggctgtggatggaaattcgcccgctcagatgaactgaccaggcactaccgtaaacacacggggcaccgcccgttccagtgccaaaaatgcgaccgagcattttccaggtcggaccacctcgccttacacatgaagaggcatttttaaatcccagacagtggatatgacccacactgccagaaga

SEQ ID NO: 221 - DNA, 411 bp, Homo sapiens
ttatttatattctccctttattaaataagaggtagcatactctattaactattctacaccttgtttttttcacttaacaatatatcctaaagatcattttatgaaaatatacaaatttcctacccctgttggagctgcttagtattccacggggtgaatgcactgtagtaggttcaaccactcctgagttggtggacatctgagtcgtttccagtctttaactattataggcaatgcttcggtgaacatgtcttttcatgtttgtgccattgtatctttagttttgtatcagttagcttttgctatgtatagcacactgcctcagaacttaatggcataaagctacaatcattcattagctcaagattctgtaggtcagcaattttggcagagctcagtgctgtccttctg

SEQ ID NO: 222 - DNA, 474 bp, Homo sapiens
  misc_feature (380)..(380): "n" = a, t, g, or c.
gtaattataaacacaatttataattttatttagcagctttgattttatatatatagtttcttgattcctaatattaacaaaattgcatgttatttatcctccaaaatgtatataatagattcagagtaacaatattaacatatattattattctatattaatactatttgtaaattaattttatttttaattttttatttatttttaatttagtttcatactttagggcatatccactaaaaatgcatagacaagtgactgtgttttaaaaatacttgaagtaattctcctctgtgtgtttaggacaccaacacaattagtttcatttatttcatttagcttttgctttggatatatagttacgcacctcataacattgnttcagtcaataatggaccacaatgaaccacgtatgcaccagtggttccataaggttgtaatggagctggacaatttctatcacctagtgacact

SEQ ID NO: 223 - DNA, 500 bp, Homo sapiens
tttttttaaatatttaagagtttatttgagcagtgatccatgaattgggcagcttcaagccagaagtggctagggagctccccagagagaacatgaggaggaggctttttaggacaaatagataaaagcaaagataatatttcattggttacagttatacagttacacagttatacagttgccttatttggtctatcccatgaggaagtcctagttactaattacgtttttgttggctgcttctgattggttgagcttaagttctgtgtttctttaacataggcatttacaagaaataccacaaataaagtttcagacatgcttgcaaatcaagcaaggttaaggtcacttaggaggcccaactggctctgtctgctcaaggattcttctggcctcgtctccattttacatgaactgttgcataaataaacacagagtacctgaaacaacggaggtgatcattctgcctaccgagtgttggccacgccaagcttggagtg

SEQ ID NO: 224 - DNA, 550 bp, Homo sapiens
  misc_feature (473)..(473): "n" = a, t, g, or c.
  misc_feature (484)..(484): "n" = a, t, g, or c.
  misc_feature (497)..(497): "n" = a, t, g, or c.
  misc_feature (545)..(545): "n" = a, t, g, or c.
gccaataacttaatagtttattagtcagtcaacaatattacaaatatttaaaaattacttaatataaatagttggcagcaaactattccattacagagttaaattaccagtacaacagacagactggagatttagacacctggaagataacaataaaataaactaaaatatttaacgaaaaatttaagctgaaggtgtttacctagtgtccataaaagcatgggttctctttttatttagaaaaaaataaaaaacggctttaacaccccattaggaatataaaataaaatcaactgaaaatattaatttgcatatcaaagaaccatttataattacaatccaaacactccataaaccacttgtgcgattctatacagaaactgggaattagaaactagttgctttaatattacaaagatttcagctccaaaaataattcaacataaaataaactttagcaattagtgtcatanaattatatatntccacataaaaantacaaataatattaatggacagaatatgaaaaaatatttcaagtattntacta

SEQ ID NO: 225 - DNA, 575 bp, Homo sapiens
  misc_feature (459)..(459): "n" = a, t, g, or c.
  misc_feature (472)..(472): "n" = a, t, g, or c.
  misc_feature (477)..(477): "n" = a, t, g, or c.
  misc_feature (517)..(517): "n" = a, t, g, or c.
  misc_feature (542)..(542): "n" = a, t, g, or c.
gcttttaacaatgatgatttattaaaagaaacaacccctcttccctgcctcccatatcccctgtagtctccatccacaggcttgctgttttcatccatcttcctagtcaaggaactccagacagtcacatcttggaagataggaactccaggaagggatgacgatcttagggaaagatgatccttaagataactcttcatctgtccttaccctgcaacacactcatggccacacccattgctgacacagtggtctccggggttgcagtcccagtcacctgtgcagagctcgacgcaggtacccaaaagccggtctcctgcagcctgaagctcttgtacctctaggcttgaagatgatgaggattcacaggaggaggaaggctgccaacttcatgttgctgttggaaggctttggaaaaacacagcagggctgagagcagctgaaatttataccttccanccgctgagctggnatgcnaggccaggggtgggactaggggactgcagacaccttaagncctggccagaaacttgacatttctngagattagcaccaccctgtgtaccctgggtctt

SEQ ID NO: 226 - DNA, 469 bp, Homo sapiens
  misc_feature (122)..(122): "n" = a, t, g, or c.
  misc_feature (136)..(136): "n" = a, t, g, or c.
  misc_feature (370)..(370): "n" = a, t, g, or c.
  misc_feature (381)..(381): "n" = a, t, g, or c.
  misc_feature (386)..(386): "n" = a, t, g, or c.
  misc_feature (407)..(407): "n" = a, t, g, or c.
  misc_feature (425)..(425): "n" = a, t, g, or c.
atagtcaaggtctcactttgtcacctaggcttgtcttgcaactcctggcttcaagcaatcctttcatctcagcctcccaaaatgttgggattgcaggtgtgagccaatgtgcccagccaaanataaaatttaaaanaaaataatgtaggtagtttctcatagtaacgtaaagaatatgtaacctgtgttttcctgaaagttgagggaaagctgaggcagctaatgggctcatacaaaggtttggaagacccattctgactacctaaaggagagtcagcattctgaccattctgactgtgcttatagaagagtcagaacttgtgaagaaagaagccttaaaatccaaggtagtaatcatcctgggaaatanttcaggaaatnacttnaaggtttgtatttttcccctnaaaattgttagaagcaangcaatgaagatctacatatatgctcttttagagctgagaatagc

SEQ ID NO: 227 - DNA, 415 bp, Homo sapiens
  misc_feature (360)..(360): "n" = a, t, g, or c.
ggtttttaataactcgtattattaaaaatctccaagagctaaagaactattttacattacaatcctgcagaaaaagtcccaaattaggcaggattagagaggtcccaagatgctgaagggagctgatgaaaacactaggtccatgcatgcagacaacagatttctgataagtcatattttccttctgtcagtctttcaagagacgatgaaaaagagtagcaagtctcacttaaaatgaaacggcaactgtttccctgtaagtcttaacacgcattttgtttttactattctgttatgcagtatgattttttaaaaagaaatagaaacaggtttttcaagcagaaaacctactttgtactnggctatgtagcctcagacgttctctccacttctgagtttctccccatgaaaaatg

SEQ ID NO: 228 - DNA, 490 bp, Homo sapiens
tgctttcaatacatgtttattgcaaaaccacaagcacagtaaccataatgtcaacataaccgtatttcctaacggaacaggagatcgccatgcctaagtgcgtgcgttttccaaagaaatggcggcttatttggaagctcacacgctgcaagtgatgacgagaagccctgttgtgaactaggagttctaaaccattaaacatttaattaccactttggcaaagcaatgcacattaccatttctacaatggaacagcacagagattttaaatgcatctttattttttagaatcttcagtattcacaatgtgtaaaatgaagcagcattttaagtaaagctctatgccaaaacagtttcttaaaaagtctggattaaaaagaaggaaaaccacacatgaataatatttatcagtgcccacagttgacactaactatagtcccctaaaagaataaaaatactcaagacttcaacatttccttacaaaagtata

SEQ ID NO: 229 - DNA, 467 bp, Homo sapiens
ttggataaataaatatattttttattcaatattcaatttaatctatattagcctatgtttcactttataggcaatgcgtagttcttaaattccaagctctagaatgctgcttgagactgttctggctgttgtgcatctgagaatgagcttctgggatggcattccttgacactgaaaacttgagaacacatattaccatgaggaagccctctaatcaggcaggaatgatggtggtcaaggaagacttcctggtgaaggtgactcttgaaatcagttgtgaatgacaaatcagaatagcaggagagagaatgttagatggaaataaggcaatctcaacagagagaacagcatgtatatagcacaggttgagaagtaaagggaacaaagagggtaatgaatggaaaaaataagccaggggagatggatctaagaaacaggtggagataaggctgtattcacaggagaca

SEQ ID NO: 230 - DNA, 604 bp, Homo sapiens
ttttttttttggcttaaaatgttttattaagtatatataatattacagggtaatatttacaaagttatgtttttttttaaataaaaaagtaccttggcaaagattgcagatattcaaagctttaaacagtgataaattgatttaatacatataaaaaaaaaaacctttaacggtaacacagctgtaaaacaactttggtcttcaaatcactgcaaaaaaatggctactgacaaatagcacacctttaattgctatgcaaaaaagctccaagagaggatcttgcacatagcaacactggagttctctttatttagaatggttaatagatatttatacgatgtgggatctaattctcaacaatggctttttgtaaataatgctccatttaataaaaacaaaatgttttcttctctcaccagtcatgataacaacacttttaagatttaagatgttgtcttacagaggagcttagtacaaatgctttctttttttcaaaaagagaaatttatgagaaagctggtcttcaatgatcttaattaagaactgtcaaagctaaaggcagaaaaactgcctggtcactcactgctcatctcttcaaagttac

SEQ ID NO: 231 - DNA, 468 bp, Homo sapiens
  misc_feature (391)..(391): "n" = a, t, g, or c.
ttagctttggaatacattcactttattggtatcagactttactcttgtccgtgggactttgcatacattgagcaactaacccgcatttcagttacattcatgtcacactttggtcatgatttagctctttggtaccaggggcaagctttgcttggtcagtagcatagggtgttgctgtgtttattggatggattccatggcccagactgagtaatgtcggggcaaggaacaacaggacaagtgctctagaaattcttgtctgtggggctgacatgacatgtctctgctttccctattaaatgtttcctgggctgaggcatgagatctcccaggcccctgaagcctggaaggggtcagaaagccaaggcagcaaggctagagggcactgcangggaaagtgacccacatctgtcccctcaaacatcagttcctctttccagggagatgggagctgtcaaacatggaatt

SEQ ID NO: 232 - DNA, 3817 bp, Homo sapiens
tgaattcgtgagagacttgagggaggcgctgcgactgacaagcggctctgcccgggaccttctcgctttcatctagcgctgcactcaatggaggggcgggcaccgcagtgcttaatgctgtcttaactagtgtaggaaaacggctcaacccaccgctgccgaaatgaagtataagaatcttatggcaagggccttatatgacaatgtcccagagtgtgccgaggaactggcctttcgcaagggagacatcctgaccgtcatagagcagaacacagggggactggaaggatggtggctgtgctcgttacacggtcggcaaggcattgtcccaggcaaccgggtgaagcttctgattggtcccatgcaggagactgcctccagtcacgagcagcctgcctctggactgatgcagcagacctttggccaacagaagctctatcaagtgccaaacccacaggctgctccccgagacaccatctaccaagtgccaccttcctaccaaaatcagggaatttaccaagtccccactggccacggcacccaagaacaagaggtatatcaggtgccaccatcagtgcagagaagcattgggggaaccagtgggccccacgtgggtaaaaaggtgataacccccgtgaggacaggccatggctacgtatacgagtacccatccagataccaaaaggatgtctatgatatccctccttctcataccactcaaggggtatacgacatccctccctcatcagcaaaaggccctgtgttttcagttccagtgggagagataaaacctcaaggggtgtatgacatcccgcctacaaaaggggtatatgccattccgccctctgcttgccgggatgaagcagggcttagggaaaaagactatgacttcccccctcccatgagacaagctggaaggccggacctcagaccggagggggtttatgacattcctccaacctgcaccaagccagcagggaaggaccttcatgtaaaatacaactgtgacattccaggagctgcagaaccggtggctcgaaggcaccagagcctgtccccgaatcacccacccccgcaactcggacagtcagtgggctctcagaacgacgcatatgatgtcccccgaggcgttcagtttcttgagccaccagcagaaaccagtgagaaagcaaacccccaggaaagggatggtgtttatgatgtccctctgcataacccgccagatgctaaaggctctcgggacttggtggatgggatcaaccgattgtctttctccagtacaggcagcacccggagtaacatgtccacgtcttccacctcctccaaggagtcctcactgtcagcctccccagctcaggacaaaaggctcttcctggatccagacacagctattgagagacttcagcggctccagcaggcccttgagatgggtgtctccagcctaatggcactggtcactaccgactggcggtgttacggatatatggaaagacacatcaatgaaatacgcacagcagtggacaaggtggagctgttcctgaaggagtacctccactttgtcaagggagctgttgcaaatgctgcctgcctcccggaactcatcctccacaacaagatgaagcgggagctgcaacgagtcgaagactcccaccagatcctgagtcaaaccagccatgacttaaatgagtgcagctggtccctgaatatcttggccatcaacaagccccagaacaagtgtgacgatctggaccggtttgtgatggtggcaaagacggtgcccgatgacgccaagcagctcaccacaaccatcaacaccaacgcagaggccctcttcagacccggccctggcagcttgcatctgaagaatgggccggagagcatcatgaactcaacggagtacccacacggtggctcccagggacagctgctgcatcctggtgaccacaaggcccaggcccacaacaaggcactgcccccaggcctgagcaaggagcaggcccctgactgtagcagcagtgatggttctgagaggagctggatggatgactacgattacgtccacctacagggtaaggaggagtttgagaggcaacagaaagagctattggaaaaagagaatatcatgaaacagaacaagatgcagctggaacatcatcagctgagccagttccagctgttggaacaagagattacaaagcccgtggagaatgacatctcgaagtggaagccctctcagagcctacccaccacaaacagtggcgtgagtgctcaggatcggcagttgctgtgcttctactatgaccaatgtgagacccatttcatttcccttctcaacgccattgacgcactcttcagttgtgtcagctcagcccagcccccgcgaatcttcgtggcacacagcaagtttgtcatcctcagtgcacacaaactggtgttcattggagacacgctgacacggcaggtgactgcccaggacattcgcaacaaagtcatgaactccagcaaccagctctgcgagcagctcaagactatagtcatggcaaccaagatggccgccctccattaccccagcaccacggccctgcaggaaatggtgcaccaagtgacagacctttctagaaatgcccagctgttcaagcgctctttgctggagatggcaacgttctgagaagaaaaaaaagaggaaggggactgcgttaacggttactaaggaaaactggaaatactgtctggtttttgtaaatgttatctatttttgtagataattttatataaaaatgaaatattttaacattttatgggtcagacaactttcagaaattcagggagctggagagggaaatctttttttcccccctgagtgttcttatgtatacacagaagtatctgagacataaactgtacagaaaacttgtccacgtccttttgtatgcccatgtattcatgtttttgtttgtagatgtttgtctgatgcatttcattaaaaaaaaaaccatgaattacgaagcaccttagtaagcaccttctaatgctgcattttttttgttgttgttaaaaacatccagctggttataatattgttctccacgtccttgtgatgattctgagcctggcactgggaatctgggaagcatagtttatttgcaagtgttcaccttccaaatcatgaggcatagcatgacttattcttgttttgaaaactcttttcaaaactgaccatcttaaacacatgatggccaagtgccacaaagccctcttgcggagacatttacgaatatatatgtggatccaagtctcgatagttaggcgttggagggaagagagaccagagagtttagaggccaggaccacagttaggattgggttgtttcaatactgagagacagctacaataaaaggagagcaattgcctccctggggctgttcaatcttctgcatttgtgagtggttcagtcatgaggttttccaaaagatgtttttagagttgtaaaaaccatatttgcagcaaagatttacaaaggcgtatcagactatgattgttcaccaaaataggggaatggtttgatccgccagttgcaagtagaggcctttctgactcttaatattcactttggtgctactacccccattacctgaggaactggccaggtccttgatcatggaactatagagctaccagacatatcctgctctctaagggaatttattgctatcttgcaccttctttaaaactcaaaaaacatatgcagacctgacactcaagagtggctagctacacagagtccatctaatttttgcaacttccccccccgaattc

SEQ ID NO: 233 - DNA, 2759 bp, Homo sapiens
gaattcgaattcctttgtttccactgggacggaatcggagctctggaggctgggctggccaagcgccccgaaggcccgatgcctgacggctcatgcggcctccttgtttgcagggcctgggcaaaaatttacactgagtcccactcttcgctccagggcccggcaggaagatgggctcccgtggacagggactcttgctggcgtactgcctgctccttgcctttgcctctggcctggtcctgagtcgcgtgccccatgtccagggggaacagcaggagtgggaggggactgaggagctgccgtcccctccggaccatgccgagagggctgaagaacaacatgaaaaatacaggcccagtcaggaccaggggctccctgcttcccggtgcttgcgctgctgtgaccctggtacctccatgtacccggcgaccgccgtgccccagatcaacatcactatcttgaaaggggagaagggtgaccgcggagatcgaggcctccaagggaaatatggcaaaacaggctcagcaggggccaggggccacactggacccaaagggcagaagggctccatgggggcccctggggagcggtgcaagagccactacgccgccttttcggtgggccggaagaagcccatgcacagcaaccactactaccagacggtgatcttcgacacggagttcgtgaacctctacgaccacttcaacatgttcaccggcaagttctactgctacgtgcccggcctctacttcttcagcctcaacgtgcacacctggaaccagaaggagacctacctgcacatcatgaagaacgaggaggaggtggtgatcttgttcgcgcaggtgggcgaccgcagcatcatgcaaagccagagcctgatgctggagctgcgagagcaggaccaggtgtgggtacgcctctacaagggcgaacgtgagaacgccatcttcagcgaggagctggacacctacatcaccttcagtggctacctggtcaagcacgccaccgagccctagctggccggccacctcctttcctctcgccaccttccacccctgcgctgtgctgaccccagggctcagcaccaggctgaccccaccgcctcttccccgatccctggactccgactccctggctttggcattcagtgagacgccctgcacacacagaaagccaaagcgatcggtgctcccagatcccgcagcctctggagagagctgacggcagatgaaatcaccagggcggggcacccgcgagaaccctctgggaccttccgcggccctctctgcacacatcctcaagtgaccccgcacggcgagacgcgggtggcggcagggcgtcccagggtgcggcaccgcggctccagtccttggaaataattaggcaaattctaaaggtctcaaaaggagcaaagtaaaccgtggaggacaaagaaaagggttgttatttttgtctttccagccagcctgctggctcccaagagagaggccttttcagttgagactctgcttaagagaagatccaaagttaaagctctggggtcaggggaggggccgggggcaggaaactacctctggcttaattcttttaagccacgtaggaactttcttgagggataggtggaccctgacatccctgtggccttgcccaagggctctgctggtctttctgagtcacagctgcgaggtgatgggggctggggccccaggcgtcagcctcccagagggacagctgagccccctgccttggctccaggttggtagaagcagccgaagggctcctgacagtggccagggacccctgggtcccccaggcctgcagatgtttctatgaggggcagagctcctggtacatccatgtgtggctctgctccacccctgtgccaccccagagccctggggggtggtctccatgcctgccaccctggcatcggctttctgtgccgcctcccacacaaatcagccccagaaggccccggggctttggcttctgttttttataaaacacctcaagcagcactgcagtctcccatctcctcgtgggctaagcatcaccgcttccacgtgtgttgtgttggttggcagcaaggctgatccagaccccttctgcccccactgccctcatccaggcctctgaccagtagcctgagaggggctttttctaggcttcagagcaggggagagctggaaggggctagaaagctcccgcttgtctgtttctcaggctcctgtgagcctcagtcctgagaccagagtcaagaggaagtacacatcccaatcacccgtgtcaggattcactctcaggagctgggtggcaggagaggcaatagcccctgtggcaattgcaggaccagctggagcagggttgcggtgtctccgcggtgctctcgccctgcccatggccaccccagactctgatctccaggaaccccatagcccctctccacctcaccccatgttgatgcccagggtcactcttgctacccgctgggcccccaaacccccgctgcctctcttccttccccccatcccccacctggttttgactaatcctgcttccctctctgggcctggctgccgggatctggggtccctaagtccctctctttaaagaacttctgcgggtcagactctgaagccgagttgctgtgggcgtgcccggaagcagagcgccacactcgctgcttaagctcccccagctctttccagaaaacattaaactcagaattgtgttttcagcaaaaaaaaaaaaaaaaaaaa

SEQ ID NO: 234 - DNA, 3665 bp, Homo sapiens
ggctggggggccgcgggcgggaggcggataaaaaggccccagggcgcccggggagggagcccgttagcgctgctccgccgcggcgcccgcccagccccggactgtccgcgctccatctggtatcttggcctcagctgtccttgaagtcaccatggcgaggtccccaccagccaccctctttctgttcctgctgctgctaggccagccccctcccagcaggccacagtcactgggcaccactaagctccggctggtgggcccagagagcaagccagaggagggccgcctggaggtgctgcaccagggccagtggggcaccgtgtgtgatgacaactttgctatccaggaggccacagtggcttgccgccagctgggcttcgaagctgccttgacctgggcccacagtgccaagtacggccaaggggagggacccatctggctggacaatgtgcagtgtgtgggcacagagagctccttggaccagtgcgggtctaatggctggggagtcagtgactgcagtcactcagaagacgtaggggtgatatgccacccccggcgccatcgtggctacctttctgaaactgtctccaatgcccttgggccccagggccggcggctggaggaggtgcggctcaagcccatccttgccagtgccaagcagcatagcccagtgaccgagggagccgtggaggtgaagtatgagggccactggcggcaggtgtgtgaccagggctggaccatgaacaacagcagggtggtgtgcgggatgctgggcttccccagcgaggtgcctgtcgacagccactactacaggaaagtctgggatctgaagatgagggaccctaagtctaggctgaagagcctgacgaataagaactccttctggatccaccaggtcacctgcctggggacagagccccacatggccaactgccaggtgcaggtggctccagcccggggcaagctgcggccagcctgcccaggtggcatgcatgctgtggtcagctgtgtggcagggcctcacttccgcccaccgaagacaaagccacaacgcaaagggtcctgggcagaggagccgagggtgcgcctgcgctccggggcccaggtgggcgagggccgggtggaagtgctcatgaaccgccagtggggcacggtctgtgaccacaggtggaacctcatctctgccagtgtcgtgtgtcgtcagctgggctttggctctgctcgggaggccctctttggggcccggctgggccaagggctagggcccatccacctgagtgaggtgcgctgcaggggatatgagcggaccctcagcgactgccctgccctggaagggtcccagaatggttgccaacatgagaatgctgctgctgtcaggtgcaatgtccctaacatgggctttcagaatcaggtgcgcttggctggtgggcgtatccctgaggaggggctattggaggtgcaggtggaggtgaacggggtcccacgctgggggagcgtgtgcagtgaaaactgggggctcaccgaagccatggtggcctgccgacagctcggcctgggttttgccatccatgcctacaaggaaacctggttctggtcggggacgccaagggcccaggaggtggtgatgagtggggtgcgctgctcaggcacagagctggccctgcagcagtgccagaggcacgggccggtgcactgctcccacggtggcgggcgcttcctggctggagtctcctgcatggacagtgcaccagacctggtgatgaacgcccagctagtgcaggagacggcctacttggaggaccgcccgctcagccagctgtattgtgcccacgaggagaactgcctctccaagtctgcggatcacatggactggccctacggataccgccgcctattgcgcttctccacacagatctacaatctgggccggactgactttcgtccaaagactggacgcgatagctgggtttggcaccagtgccacaggcattaccacagcattgaggtcttcacccactacgacctcctcactctcaatggctccaaggtggctgaggggcacaaggccagcttctgtctggaggacacaaactgccccacaggactgcagcggcgctacgcatgtgccaactttggagaacagggagtgactgtaggctgctgggacacctaccggcatgacattgattgccagtgggtggatatcacagatgtgggccccgggaattatatcttccaggtgattgtgaacccccactatgaagtggcagagtcagatttctccaacaatatgctgcagtgccgctgcaagtatgatgggcaccgggtctggctgcacaactgccacacagggaattcatacccagccaatgcagaactctccctggagcaggaacagcgtctcaggaacaacctcatctgaagctgtcactgcacactcctagctgctgccgatacaccagatacctcagcttattggagccatgcccttcacagagtcccaactcagaggaaaagggccagtgccaaggggcaccaagaacctgctcaggaagccttttgatggcaagatcaccaatccagatggtattgctccctcaggatggctctgggcctgcccctaagggcctgtggcctatggaatatgtcctccaggctttgctcagctgagctcctcttctgtaaggaaacccagtcatccctgaatcttgccacagagatccgggattcaggagctctcagtttcttagggatggactatggcccagtcccccatctaagtggtgctttgcaaatgtcttggaggagtataggacagaggaccaaaatacacagcaggtagtgttagctctctgctaggagctcaaagcaacacaacttgtatcaaaatcacaactggcagagaagctggtggatccaatcctttcttcatctgttgttatttagaactcacctctcacactctgttctttagtgtccttacctttatcttaccacacacatgggtgtttctattatccttggaagcacagacctcgggcatccccttattgcctgatgggccaacaccaacagttacggagtgcttgagaaggggcaagtttcacagaaatggccagatagggccttcctacagagcagcaagagtaggccaagcagaaagactgctgaggtaacacggaccccagcccctgtcagggcctctgccaaggaaataatatggaccatttacctggcaggcagtctgctctctctcaggatcaccacgcatctcaggattggtctaaacttcaagtctcaaccaagtgtctgaagtgaactttgcattgaataaatttttgccatggaaagaacatcaaacaagccactcatctctacagagataagaaaacaagtttggcagagcaagagacagaagaccgtggagaaatcagaagggggaacagtcagtttagttaaggatggaacctgggaaaggccaccattcctgcttgatggggctctgatttgctcttgctcaagtggaataaaaccccatggtcttcttgacatgattcttgatcttttctccactgagacacacttaagtgatgatccttacaggactgacaccctaatgccaataaaagttgctcattatggactgctacaaaaaaaaaaaaaaa

SEQ ID NO: 235 - DNA, 547 bp, Homo sapiens
  misc_feature (31)..(31): "n" = a, t, g, or c.
  misc_feature (403)..(403): "n" = a, t, g, or c.
gaggagcaaagctgccttccaagtgcctgtntgtgcctgggagaacagagcaggagcgtcgtgcggtccaccgcgcagtgcatggcgattccaagcgctgaacaactcccctggacccttgggcctgcatctgactcccagctgcagagtcagaagctgagtccaggcaactgcttggccactcccgatcgctcctccctggacacccggttaccaaagtcagcaaagaagatgcggtaatcgccgcctgatctccacatggtgaacacaacactcccaccaacacctccttgactggtcggtcttcagcaccgggggtgggcaggcaggtgttctgtgttgacgagaattgcacaggctaaacacaaacacggaaccagagtgagaacacctcactcacggnagcccaggctgctccctaccaggtgacggagcgcgccggggctgtgggtgccaggggtgagtgtagggactcgtcatgagtggggatccccacgttcctgtcactgctgtcaaacagaaggtaaacagtcttatgaatgtattt

SEQ ID NO: 236 - DNA, 467 bp, Homo sapiens
tttttttgtttttcacagcactgattgtttttttcatatttttctcctgcctttgatacaagacatgtaagatgctgcaaaacctaactatgacagttccatgtaatatttttccagttaattttgtttaaaagtgagatgataatataaaaggatctcatataatagaataaaaataataaaaatttgttaatgaaacgtagacatacctacccattcttgttagttaagttagggtttgctgaaatcattcgcactcacgtaaagtataaatggggacctgaaagagcttttgtaaactcaagatatgcgggatctgagctgataatcagttaggctccatgttgagttgtgcgtgactcaattgtccttaaatttcgccttcatattttgtcataaatgggctctcaaatctttataagaaaacaaaatttgcctagatgcataaacgtttaggtaaagttgga

SEQ ID NO: 237 - DNA, 501 bp, Homo sapiens
ttgagcaacaaggctgtttatttcacctgggtgcaggcgggctgagtccgaaaagagagtcagcaaagggagatggggtggggccgttttataggattagggaaggtaatggaaaattacagtcaaagggggtttgttctctggtgggcaggtgtggatctcacaaagtacactctcaagggtggggagaattacaaaggaccttcttaagggtgggggagattacaaagtacatttatcagttagggtggggcaggaacaaatcacaatgttggaatgtcatcagttaaggctgtttttacttcttttgtggatcttcagttactttaggccatctggatgtatacgtgcaagtcacaggggatgcgatggcctggcctgggctcagaggcctgacattcctgccttcttatattaataagacaaataaaacaaaatagtgttgaagtgttggggcagcgaaaatttttggggggtggtatggagagataatgggcgatg

SEQ ID NO: 238 - DNA, 1964 bp, Homo sapiens
tgacaatctaccagaagctttccctattactttagaatggggtggaagagtggtcagagaaacagtatattggttccagtatgaaagtgattcatctttgaatagtaatgtttacgatgttgcaatgaaacttgttaccaagcactttccaggtgaatttgggagtgaaatcctagttcagaaagttgtccacactatattgcatcagactgccaaaaagaatcccgatgattatactcctgtaaatatagatggtgctcacgcccaaagagttggagatgttcaaggacaagaatcagagtctcagctcccaactaaaattattcttactggacagaaaacaaaaactttgcacaaggaggagttaaacatgagtaaaactgaaagaactattcaacagaatattacggaacaggcttctgtaatgcagaaacggaaaacagagaagttaaaacaagaacaaaaagggcaacccaggactgtttctcccagtaccattcgtgatggtccatcctctgcacctgctacacctaccaaggctccctattcaccgacaacttctaaggagaagaagatccgaatcacaactaatgatggacgacagtccatggttacccttaagtcttcaacaaccttttttgaacttcaggaaagtatagccagagaattcaacatttttccatatttacagtgtattcgatacgggtttcctcctaaagagttaatgccaccacaggcaggaatggaaaaggaaccagttcctttacagcatggcgacagaattacaatagaaattctaaaaagtaaagctgaaggtggtcagtctgctgcagcacactcagcccacactgtgaaacaagaagatattgctgttactggtaaactgtcatctaaggaacttcaggagcaagctgaaaaagaaatgtactccttgtgtcttttagcaacattaatgggagaagatgtatggtcttatgcaaagggacttcctcacatgtttcagcagggtggtgtattctacagtattatgaagaaaaccatgggtatggctgatggcaagcattgtacttttccacatctgcctggcaaaacctttgtctataatgcttctgaagatagactggaattgtgtgtggatgctgcaggacatttccccattggtcctgatgttgaagatttagttaaagaggctgtaagtcaggttcgatcagaggctactacaagaagtagggaatcaagtccctcacatgggctattaaaactaggtagtggtggagtagtgaaaaagaaatctgagcaacttcataacgtaactgcctttcagggaaaagggcattctttaggaactgcatctggtaacccacaccttgatccaagagctagggaaacttcagttgtaagaaagcataatacagggacagactttagtaatagttccacctaaaacagagccttctgtattcacagcttcttctagtaatagtgagcttattcgaatagctcctggagtaataacaatgagagacggcaggcagcttgatcctgatttggttgaggcccagcgaaaaaaaattgcaggaaatggtttcttctattcaggcttcaatggacaggcaccttcgggatcaaagtacagagcagtcaccatctgatcttcatcaaaggaaaacagaagttgtgagttcttctgcagagtctgggagtcttcagactggtttgcctgaatcttttcctttaactggtggtactgaaaatttgaatacagaaacaactgatggctgtgtagcagatgcactgggagcagcctttgccacaaggtcaaaagcacaaaggggaaattccgtggaggagcttgaagagatggatagtcaagatgctgagatgactaacacaactgaggccaatggatcactcttgatttaattagaggctaataaaggcagaatgtttattgtgaatatgta

SEQ ID NO: 239 - DNA, 4020 bp, Homo sapiens
gtcaattgccctttagtcccaggactaaccggaagcttctgcaacaggaggacattgaaaataagatggaacccatccacataaggatttgcctcaaagggcactgcaaaaattgaacagaggaatcccaaggaagctgcctgaatttgcctgtatactctcgttctgcgacttataaaggaccagacaaatcaaattagtggttttggtttccgccagctgtggatgcctttgacattatgaccgcagaggattccaccgcagccatgagcagtgactcggccgccgggtcctcggccaaggtgcccgagggcgtggcgggcgcgcccaacgaggcagcactgctggcgctgatggagcgcacgggctacagcatggtgcaagagaacgggcagcgcaagtacggcggcccaccgcccggctgggagggcccgcacccgcagcgtggctgcgaggtcttcgtgggcaagatcccgcgcgacgtgtacgaggacgagctggtgcccgtgttcgaggccgtgggccgcacctacgagctgcgcctcatgatggactttgacggcaagaaccgcggctacgccttcgtcatgtactgccacaagcacgaggccaagcgcgcagtgcgtgagctcaacaactacgagatccgcccgggccgcctgctcggcgtgtgctgcagcgtggacaactgccgcctcttcatcggcgggatccccaagatgaagaagcgcgaggaaatcctggaggagattgccaaggtcaccgagggcgtgctggacgtgatcgtctacgccagcgcggccgacaagatgaagaaccgcggcttcgccttcgtggagtacgagagccaccgcgcggctgccatggctcgccgcaagctcatgcctggccgcatccagctgtggggccaccagatcgccgtggactgggccgagcctgagatcgacgtggacgaggacgtgatggagaccgtgaagatcctctacgtgcgcaacctcatgatcgagaccaccgaggacaccatcaagaagagcttcggccagttcaaccccggctgcgtggagcgcgtcaagaagatccgcgactacgccttcgtgcacttcaccagccgcgaggatgccgtgcatgccatgaacaacctcaacggcactgagctggagggctcgtgcctggaggtcacgctggccaagcccgtggacaaggagcagtactcgcgctaccagaaggcagccaggggcggcggcgcggctgaggcagcgcagcagcccagctacgtgtactcctgcgacccctacacactggcctactacggctacccctacaacgcgctcattgggcccaacagggactactttgtgaaagtagccatccctgccattggggctcagtattccatgtttccagcagctccagcccctaaaatgattgaagatggcaaaatccacacagtggagcacatgatcagccccattgctgtgcagccagacccagccagtgctgctgccgccgcagccgcggccgcagccgccgcagccgctgtcattcccactgtgtcgacgccaccacctttccagggccgcccaataactccagtatacacggtggctccaaacgttcagagaattcctactgccgggatctacggggccagttacgtgccatttgctgctccagctacagccacgatcgccacactacagaagaacgcggcagccgcggccgccgtgtatggaggatacgcaggctacatacctcaggccttccctgctgctgccattcaggtccccatccccgacgtctaccagacatactgaggctggtgaccagcacgaagacagaccacacaaacaccactgaaggaacgcttgactatttatgaagaaggaacatgttggattcacacatgcaacctgaaagtgaagaatgttagcagatttatttctgaattattttatatacatgaagttttcactagttttttaagactattttcaacttagcatgcctacgttcatacatttccaaaagacttgcaatggttcgtgccttcattccatcttttaaaaatttgtatgctgtactacatttgtatagaggtttttgttgttgtttttttaaggatatattttcagtatgaaggttattttcttaacttctgcactccagagatttctattttgtagtaccttcaataatatatcaactatatattaaaaaagcacacttgaggagctagggaactattttgaaaaatatatacaatatttaaagatacaaacagtagtgcttaaaaatactacataaagcattattttaaaggttatactggaaagtgcaattttaaaatgagtaaaacctctgtatttctgctggcattaagggttgatggtgttaccatgtatcatcatggcggtactattttttaaaagaaattaaacactggatctctccttaagccaacattgaaaagacttgccgcacttctgagtccaaacactggaaagctctccttgccaccgttagccggggctcattctccatgtgccttagccttaaacatgcccccactcccacatctctcaccctgtcccctcctccccagattcccaatcccaccgcaatgtttggcaagcctaggactgataagtagctctgatagaggagctggtggcttttatacttcttcctgggtttttgttggggtttgttgtttcgttgttttttgttttttttttgtttggttggggaagtattgtcttctacgtgtgctattttcagtagcagagtaagcacaaggttttaatcgagttgcataagacacctttgcatagctatttaattgcccaatgtaaaactttaatgccatttctaatgcttttattcatttttgaagtatgagtttgtagggacaaagaatgtatgttatcgtagacaagacccccagagactcttttcagcagaaagttatgcttctagttgccttaccatgtttcttgcaaaactgtccatggtcctcaagggtgttggaaacattatgtttattaaatgggcctctcttcctttgctgtgcacttgatgggtgaactggattggggtgtgcacatccaggaggaggaggagagacctgtagaagtttaaagatagtttgtaaatatcttctaatgcttgtttttagtccttttatgttggagaagttcatggtatgtagtttaatgcaaaatgaaaccattttatttcaatgttattaaaaaggtttgttttattaggaagttaatgtattgttgcagtgttttgtgcctgtttaaaggcttttgtttagcagagtgaatgtaaaatacagtaaaatgttaagattgtcatctactttttaaaaaaaaatatcaacttggaattgttttttaaaggctcaatcaaggaagtgaggtgtgcaataaggtagcaagtaaaacgcagttgcgtttttatgtcatgttagagatccatacaattttccactcacgggatttttgttgatggctgaattcttgtggattcataagaggatcatgcccttagcaagtacttttgttttgttttaaattaagagattcccaaatgcctttttccccctcatcttgaaatgagatgagtttttatgtgtaagcaatatttatttaactattctataaaattattgagtgcctactgaggcctttaagcaccgctaacattcctttccatcattcttttgaatgacataaaataattgtgcaatgttcctgatgatgtaccccacagctgcattcaaactcaaatctgtgggaatgagtgactcgaccaaatgtaattcggatcagatcctcatcccctgactgtgtgaaaaaagtactctccttctagtgaaggattgtcacagagtttcactggatgaaactatgacccagtattcttactgtattttacatgtgcctgtaaattattttgccgaaataagaagaagaagaggaagaaagaacagtagaaaaaaaaaataaaaaaaaa

SEQ ID NO: 240 - DNA, 2835 bp, Homo sapiens
gtacagaagcaaaatcaaacctgctatttcagcactcctgtttttaacttggtgtctttagtgcttggattggtgggatgtttcggaatgggcattgtcgccaattttcaggagttagctgtgccagtggttcatgacgggggcgctcttttggcctttgtctgtggtgtcgtgtacacgctcctacagtccatcatctcttacaaatcatgtccccagtggaacagtctctcgacatgccacatacggatggtcatctctgccgtttcttgcgcagctgtcatccccatgattgtctgtgcttcactaatttccataaccaagctggagtggaatccaagagaaaaggattatgtatatcacgtagtgagtgcgatctgtgaatggacagtggcctttggttttattttctacttcctaactttcatccaagatttccagagtgtcaccctaaggatatccacagaaatcaatggtgatatttgaagaaagaagaattcagtctcactcagtgaatgtcgcaggccatttctaaaagtgctacagaggacagacagggttttgaggccaccctgattattgggatgcatctgcagcacatccaggacttgaatttcattacgagttcctaatagttgtatttctaaagatgtgtttcctagagaatgtacagccttatgacactgtagtgatgtttttataattttctaagtagatttttttatattaacaaattcatatacagaaaaaataaggtgttacaaaaaatggagagctcttatttttgtacagattctgtcgtttttttttatttgtgtgagatttatggaaatacactaaatgagtaattcaggttcagtacatttattacaaagtgaaatcaggggatattcatttgtaaattttattcttagtgaatgaactgtataattttttttatcaggagagcacttataaaattcaatttataaagatcatatacccaaatcataaagatttagttgatacattaacactaagatactctgatttttagcgaactaaacaaagtgcttctactgagaggcctttataccaccatgtacagtaactctaagtgaatacggaagaccttggttttgaaattctgccaccttgtttctccctgctcatgaggtcgcaccttttgctcttgctgctaattgcccattcgtagtgggtgtaatgccaggtggaatggtttcaacaagtcaggtgaaaaccatcctttattgttgctggcacaacttgatatatagtctgactcagaactgaagctcacatctcaaattcatttcatgccagtaaatgtggcaaagagaagaaaggcccaagagcgagacaagaagaatggagaagggggcagccaagaagaacttctgggttcagggtactgtttatttgctccttctcttcatgcctgtggctggatgtcccacaacactataagaaatataagtcaagccctttgtgttaagcaagaactacagactccatcttttcacccaaatcatgaatgaccaataaaaagcaagttattccagaggaagaagcagcccttgaaatgttaaggcttaggcttgaaaggtgaagagcaggaattctctctttcaaatcctagagcataaacccatgtgtggccaagtgagatcagccctcaagggcacatgccaagggcagagcagcccatgtagacagcttcggagggcatgggggtgtagggagttcggggtagctcctcattaactatttgttgggtgagtaaaggggtgaggctcagtggcaggtacctctgcaatgacaagctgcctcccctctatgtgtttagcatatgttattagaacatgtccgacacccctaccgctgccatttgggccctttaataaagccaagtagagaaatctggcaataaaaggcaaatgtaagcatgctttctttaagacgcatcataaatggttttctttaagtgaatggaagagtttgacagagatacacctttgtaagaaaacattaagaatgctggctggctgtggtggctcacacctgtattcccagcactttgggaggcctaggcaggaggattgcttgagcctgggacttcgagaccagactgggaaacatggcaaaatcccatctctacaacaaaaatacaaaaattagccaagtgcggtggtgtgcctgtagtcctagttacttgggaggctgaggtgggagaatcacctgagcccaggaggtggaggctgcagtgagccatgccaatgcactccagtctgggcaacagagtgagaccctgtctcaaaaataaataaataaataaatgaataaagagaatgctaatcatttctgggttcactgcgactcactgtagtgctggggatcccccttgtaacactggaactgaaaggcagtgatgaaagctatgtcaagcattcattattctgaagaggaggagaaatgccacatacctttcccatgggacctgtggtggaatgaatccatacttctgcctcacttcgagcagacttttgttctcggcgctcctcacgatggagtttcatgcttcattttcacatctctctgcacaattagattgggagctccttgagggcagagtacgtgccttaatctttatctttgtaatgccacaatgaacagagtgcctcctggtacactgtaggagcttaagaaatactcactgaatgcatgaatgaatgaatgaacaaatgaaggaatgactaaggatgtttgtagtgctataatatagaatgggatttactctgctttaccagttagtttcataataaacaaatagtctgt

SEQ ID NO: 241 - DNA, 634 bp, Homo sapiens
  misc_feature (616)..(616): "n" = a, t, g, or c.
ctcaatcatcgtttttaattggctttataagctaaagtgcatagtaaagacaaaaaaaggaaatgcatacataggaaagggacacttagaaaggacctgagatacctaaatgtctgttctaaggaacactggaaggagggaatgcagatgcaggcagcaggcctgggtctggcttctggcctgggtttggagcctgcagaagctgctggcatgctagctctacccagggaacagctccaagagggagtgttgggatgaaggatcacacttgggataggtgctgctggtaccaaatgtgattttagctccattcagggcccaggggtaaccagcagtgccaccaaacctgtcagcaggtaaagaaacttctaccatcccaaagtgcaggttacaggaaaggggtcactccttaaatgacgacctggggcctgctgcataaggcccatcttatgcagcatgtgggctgtcccatcttccccactctcagtgactatgtactgtgtcagggtgaattggtgcagtcctttggtcttatcacgtgcctccatcttcctggaggcagggtgcccaaggaaggcaagggaaggggttcttgtgccccttaagggataagcanttcttaacaactatgggc

SEQ ID NO: 242 - DNA, 538 bp, Homo sapiens
tttttttttttccttgcatcctctaatttcagattggtcattttgttaaaacaatgagaagtgttattgtcattatactgccattctataaactcactgatacaatctgcccgggattcctgttctttggccaatcgaactctcttgatcatcgcctcaatttcatctctagcctgcatcacatctctgctaattcccaaaaccttaatcaaaggtctcttatggtccagggaaatgttaatatttaacttcttctgcagctcattcaactcctgatactccttttcatcaaagtctttgatgcactcatcttcactggtgtaaggacactgttctttttcaatcaggtcttgtagccaggagatagcgtattccacacacgtgacattttcaccacacacccgaaaagttgctgattctgttttcttttccaaaaccaaatgattctttttttggggagattgctttgaaaagcccaaaaatgatgcaagtttagacatcacagactgttgggaagaaagctgagtcccttctcttt

SEQ ID NO: 243 - DNA, 1014 bp, Homo sapiens
ttcctcagaaacgagcaaacctgaaagctactctctcagcttcagagggaaaaaatggttgtagatttctggacttgggagcagacatttcaagaactaatccaagaggcaaaaccccgggccacatggacgctgaagttggatggcaaccttcagctagactgcctggctcaagggtggaagcaataccaacagagagcatttggctggttccggtgttcctcctgccagcgaagttgggcttccgccaagttgcagattctgtgccacacgtactgggagcactggacatcccagggtcaggtgcgtatgaggctctttggccaaaggtgccagaagtgctcctggtcccaatatgagatgcctgagttctcctcggatagcaccatgaggattctgagcaacctggtgcagcatatactgaagaaatactatggaaatggcatgaggaagtctccagaaatgccagtaatcctggaagtgtccctggaaggatcccatgacacagccaattgtgaggcatgcactttgggcatatgtggacagggcttaaaaagctacatgacaaagccgtccaaatccctactcccccacctaaagactgggaattcctcacctggaattggtgctgtgtacctcgcaaaccaagccaagaaccagtcagatgaggcaaaagaggctaaggggagtgggtatgagaaattagggcccagtcgagacccagatccactgaacatctgtgtctttattttgctgcttgtatttattgtagtcaaatgctttacatcagaatgatgaaaataggcttgccactttctcttattttaattccatggtagtcaatgaactggctgccactttaatataactgaaaattcattttgagaccaagcaggatcaagtttgtagaataaacactggtttcctagctatcctctgaaaacagtatgaaacatgaccaagtacataatggatttagtaataaatattgtcgaattgctaaaaaaaaaaaaa

SEQ ID NO: 244 - DNA, 1554 bp, Homo sapiens
gcgcgcctcgccggcgcctccatcccggatccttgctgcagcgtcagcgccgccgcccgtgcctttcctcttcctcctcctcctccttggcatccgcctcttcttcctcctgcgtcctcccccgctgcctccgctgctcccgacgcggagcccggagcccgcgccgagcccctggcctcgcggtgccatgctgccccggcggcggcgctgaaggatggcgacgccgctgcctccgccctccccgcggcacctgcggctgctgcggctgctgctctccggcctcgtcctcggcgccgccctgcgtggagccgccgccggccacccggatgtagccgcctgtcccgggagcctggactgtgccctgaagaggcgggcaaggtgtcctcctggtgcacatgcctgtgggccctgccttcagcccttccaggaggaccagcaagggctctgtgtgcccaggatgcgccggcctccaggcgggggccggccccagcccagactggaagatgagattgacttcctggcccaggagcttgcccggaaggagtctggacactcaactccgcccctacccaaggaccgacagcggctcccggagcctgccaccctgggcttctcggcacgggggcaggggctggagctgggcctcccctccactccaggaacccccacgcccacgccccacacctccatgggctcccctgtgtcatccgacccggtgcacatgtcgcccctggagccccggggagggcaaggcgacggcctcgcccttgtgctgatcctggcgttctgtgtggccggtgcagccgccctctccgtagcctccctctgctggtgcaggctgcatcgtgagatccgcctgactcagaaggccgactacgccactgcgaaggcccctggctcacctgcagctccccggatctcgcctggggaccaacggctggcacagagcgcggagatgtaccactaccagcaccaacggcaacagatgctgtgcctggagcggcataaagagccacccaaggagctggacacggcctcctcggatgaggagaatgaggacggagacttcacggtgtacgagtgcccgggcctggccccgaccggggaaatggaggtgcgcaaccctctgttcgaccacgccgcactgtccgcgcccctgccggcccccagctcaccgcctgcactgccatgacctggaggcagacagacgcccacctgctccccgacctcgaggcccccggggaggggcagggcctggagcttcccactaaaaacatgttttgatgctgtgtgcttttggctgggcctcgggctccaggccctgggaccccttgccagggagacccccgaacctttgtgccaggacacctcctggtcccctgcacctctcctgttcggtttagacccccaaactggagggggcatggagaaccgtagagcgcaggaacgggtgggtaattctagagacaaaagccaattaaagtccatttcagaaaaaaaaaaaaaaaaaaaaaaaaaaaaaaaaaaaaaaaaaaaaaaaaaaaaaaaaaaaaa

SEQ ID NO: 245 - DNA, 927 bp, Homo sapiens; identical to SEQ ID NO: 90

SEQ ID NO: 246 - DNA, 1310 bp, Homo sapiens
agacgccgagatgctggtcatggcgccccgaaccgtcctcctgctgctctcggcggccctggccctgaccgagacctgggccggctcccactccatgaggtatttctacacctccgtgtcccggcccggccgcggggagccccgcttcatctcagtgggctacgtggacgacacccagttcgtgaggttcgacagcgacgccgcgagtccgagagaggagccgcgggcgccgtggatagagcaggaggggccggagtattgggaccggaacacacagatctacaaggcccaggcacagactgaccgagagagcctgcggaacctgcgcggctactacaaccagagcgaggccgggtctcacaccctccagagcatgtacggctgcgacgtggggccggacgggcgcctcctccgcgggcatgaccagtacgcctacgacggcaaggattacatcgccctgaacgaggacctgcgctcctggaccgccgcggacacggcggctcagatcacccagcgcaagtgggaggcggcccgtgaggcggagcagcggagagcctacctggagggcgagtgcgtggagtggctccgcagatacctggagaacgggaaggacaagctggagcgcgctgaccccccaaagacacacgtgacccaccaccccatctctgaccatgaggccaccctgaggtgctgggccctgggtttctaccctgcggagatcacactgacctggcagcgggatggcgaggaccaaactcaggacactgagcttgtggagaccagaccagcaggagatagaaccttccagaagtgggcagctgtggtggtgccttctggagaagagcagagatacacatgccatgtacagcatgaggggctgccgaagcccctcaccctgagatgggagccgtcttcccagtccaccgtccccatcgtgggcattgttgctggcctggctgtcctagcagttgtggtcatcggagctgtggtcgctgctgtgatgtgtaggaggaagagttcaggtggaaaaggagggagctactctcaggctgcgtgcagcgacagtgcccagggctctgatgtgtctctcacagcttgaaaagcctgagacagctgtcttgtgagggactgagatgcaggatttcttcacgcctcccctttgtgacttcaagagcctctggcatctctttctgcaaaggcacctgaatgtgtctgcgtccctgttagcataatgtgaggaggtggagagacagcccacccttgtgtccactgtgacccctgttcgcatgctgacctgtgtttcctcccca

SEQ ID NO: 247 - DNA, 604 bp, Homo sapiens
  misc_feature (340)..(340): "n" = a, t, g, or c.
  misc_feature (354)..(354): "n" = a, t, g, or c.
  misc_feature (448)..(448): "n" = a, t, g, or c.
  misc_feature (454)..(454): "n" = a, t, g, or c.
  misc_feature (460)..(460): "n" = a, t, g, or c.
  misc_feature (466)..(466): "n" = a, t, g, or c.
  misc_feature (496)..(496): "n" = a, t, g, or c.
  misc_feature (504)..(504): "n" = a, t, g, or c.
  misc_feature (516)..(516): "n" = a, t, g, or c.
  misc_feature (575)..(575): "n" = a, t, g, or c.
tttttacctcatggtctctctttaattgaccaaaaccttccatttttctctaaatacaaagcgatctgtgttctgagcaacctttccccgaacacacagcttcagtgcagcacgctgacctgagtatccaccatgtgccaggcaagtgctgggcaaccgaggcaccaaggtccgggccacctgcccgcagcaaggcccagctgaggtggtggagggagcccctgaggtcaggggccgtttcggttcagggtggcaggtgtccagcactggggtatggcgtcgaggcttccatggggtgggggaggccagcttccttctgacaggatgggcgcatacagtncctggtgtgatttntgcacaacccgtgttccaggttgcacatcctcccaaaggagacacccagaccctttcagcacggggcgggcaagttgctgcggcggaaggcagnattttnagctgntgaggnaaggtcattggattcaaagtgtttttatcnggtaaaangggttggtcttnaatttcttaaacccatattgggtaagtgaatgataaaaaattgggttggggtttaaganaaagtggaactctttttgaaaaagcaagt

SEQ ID NO: 248 - DNA, 3031 bp, Homo sapiens
gtggtagcggttattcggcggcccgcggcggaccatggccctggccctggcccggcgtcgctgggctttcctcacggcgtccccgagcagcgtcgcagagcgggccgacttccgggaaggaactgaccagcgactgagcggcggccggcgcgcttagcgccctgaacatgcggcagtccctgcgggcgaccccgggctccggacaggcggcggcggaggcggcggctcgggagggaaggaggcggcggcgccggcggaggtggcggcggagacggccggcgcccggcgcggagccctagggaggcagttcagcgcggcctcgggcctcgtcgagaaggatgctgtcccgaaagaaaaccaaaaacgaagtgtccaagccggccgaggtgcaggggaagtacgtgaagaaggagacgtcgcctctgcttcggaatcttatgccttcattcatccggcatggtccaacaattccaagacgaactgatatctgtcttccagattcaagccctaatgccttttcaacttctggagatgtagtttcaagaaaccagagtttccttagaactccaattcaaagaacacctcatgaaataatgagaagagaaagcaacagattatctgcaccttcttatcttgccagaagtctagcagatgtccctagagagtatggttcttctcagtcatttgtaacggaagttagttttgctgttgaaaatggagactctggttcccgatattattattcagacaatttttttgatggtcagagaaagcggccacttggagatcgtgcacatgaagactacagatattatgaatacaaccatgatctcttccaaagaatgccacagaatcaggggaggcatgcttcaggtattgggagagttgctgctacatctttaggaaatttgactaaccatggttctgaagatttaccccttcctcctggctggtctgtggactggacaatgagagggagaaaatattatatagatcataacacaaatacaactcactggagccatcctcttgagcgagaaggacttcctcctggatgggaacgagttgagtcatccgaatttggaacctattatgtagatcacacaaataagaaggcccaatacaggcatccctgtgctcctagtgtacctcggtatgatcaaccacctcctgtcacataccagccacagcaaactgaaagaaatcagtcccttctggtacctgcaaatccatatcatactgcagaaattcctgactggcttcaggtttacgcacgagcccctgtgaaatatgaccacattctgaagtgggaactcttccagctggctgacctggatacataccagggaatgctaaagttgctcttcatgaaagaattggagcagattgttaaaatgtatgaagcatacagacaagcccttcttacagagttggaaaaccgaaagcagagacagcagtggtatgcccaacaacatggaaaaaatttttgagctgattttttaaaaatttaagttttgtaagagctttaaaatattttcacagataaaaaattgcaaacaagtactctggttaataaatgctgcttcctttgtggaaattataaaattctaactttacatgtattttgttattagaaattttcttttattgaatgagaaaaattagtctatcattttaagagccaatatggcaaacactttcaaatactgtatattaggaaactgttttggtattcttgatggaaaaaaacgcagcggaaatgtcattatgaacagatgttaaataggaaattattacttgttaacttcttacagcagtagtaccttctttaaaaaaaaaaaagaatctgcggtatttttttaaaaaaaaagtttaccgctgtagtgtgaaatattgtctggaaagggatggtttaaatattaccatgatgtagttgaaatataaaataggatttggaaccttattgtgataaatatttatatatgatgtatgtttgtctcccctctccaaagtaaggaacccagctgggcgtggtggctcactcctgtaatcccagcattttgggaggccgaggtgggtggaccgcttgagtccacgagtttaagaccagcctgggcaacatggtgaagccccatctctacaaaaaatacaaaaaaattagccgggtatgatggtgtgtgcctctagtcccagctacttgggaggctgaggtcagaggatggcttgagcccaagaggcagaggttgcagggtcaagatcgcaccacttgcactgcagcctgagagagagagagccagaccttgtctcaaaaaataaaaaataaaaaaataaaaacaaaataaggaatccttttaaagcatgttgagaaagtattttttggtatgaatgggtgacgggccttttaatctttcaggaatacatataagcaggaatacttagcctgtattgggaaggtgcgtgaaactcaaagttgctaacatcatcttccttattttcagccagtgctgttactgcatttagcatggctctgacgaggcagtggagagttcctgacagcatagcatactgccttctgacagactgggttaagctaccaaaaatgacaaccagggattcaaaaaaaatttttggtcattaaatcgaatgtatattattactttttaattttctaagtatttatcacaggactttaacaccatatatttccctcccagtttttctccccttttggtttaatagttaaaacatttttcataattagtgctgtacatttgattgcaaacaaattggtgatacttctaaactataactataaatctctagaattctgtgaatttcaacattatttgaagtagttcttcagttatatttacatgtgttgtaaatatgtaaatatacttttagcttaggaagtcttccagaatacaaactactcccagttagatatcagtgagtttgaataactgaagaaatgttgacaatgttaagtgtttgattttatataacaagcttattaaatatatttttgtgg

SEQ ID NO: 249 - DNA, 2410 bp, Homo sapiens
attctcatggtcagtagcaacttttggttcaaatatcccaaaacatgctcaaaagtagaacattttgtttcaatattaggaaagtgctttgaatccccttggacgacaaaagcgttgtctgagacagcatgcgaagactcagaggaaaacaagcagagaataacaggtgcccagactctaccaaagcatgtttctaccagcagtgatgaagggagccccagtgccagtacaccaatgatcaataaaactggctttaaattttcagctgagaagcctgtgattgaagttcccagcatgacaatcctggataaaaaggatggagagcaggccaaagccctgtttgagaaagtgaggaagttccgtgcccatgtggaagatagtgacttgatctataaactctatgtggtccaaacagttatcaaaacagccaagttcatttttattctctgctatacagcgaactttgtcaacgcaatcagctttgaacacgtctgcaagcccaaagttgagcatctgattggttatgaggtatttgagtgcacccacaatatggcttacatgttgaaaaagcttctcatcagttacatatccattatttgtgtttatggctttatctgcctctacactctcttctggttattcaggatacctttgaaggaatattctttcgaaaaagtcagagaagagagcagttttagtgacattccagatgtcaaaaacgattttgcgttccttcttcacatggtagaccagtatgaccagctatattccaagcgttttggtgtgttcttgtcagaagttagtgaaaataaacttagggaaattagtttgaaccatgagtggacatttgaaaaactcaggcagcacatttcacgcaacgcccaggacaagcaggagttgcatctgttcatgctgtcgggggtgcccgatgctgtctttgacctcacagacctggatgtgctaaagcttgaactaattccagaagctaaaattcctgctaagatttctcaaatgactaacctccaagagctccacctctgccactgccctgcaaaagttgaacagactgcttttagctttcttcgcgatcacttgagatgccttcacgtgaagttcactgatgtggctgaaattcctgcctgggtgtatttgctcaaaaaccttcgagagttgtacttaataggcaatttgaactctgaaaacaataagatgataggacttgaatctctccgagagttgcggcaccttaagattctccacgtgaagagcaatttgaccaaagttccctccaacattacagatgtggctccacatcttacaaagttagtcattcataatgacggcactaaactcttggtactgaacagccttaagaaaatgatgaatgtcgctgagctggaactccagaactgtgagctagagagaatcccacatgctattttcagcctctctaatttacaggaactggatttaaagtccaataacattcgcacaattgaggaaatcatcagtttccagcatttaaaacgactgacttgtttaaaattatggcataacaaaattgtcactattcctccctctattacccatgtcaaaaacttggagtcactttatttctctaacaacaagctcgaatccttaccagtggcagtatttagtttacagaaactcagatgcttagatgtgagctacaacaacatttcaatgattccaatagaaataggattgcttcagaacctgcagcatctgcatatcactgggaacaaagtggacattctgccaaaacaattgtttaaatgcataaagttgaggactttgaatctgggacagaactgcatcacctcactcccagagaaagttggtcagctctcccagctcactcagctggagctgaaggggaactgcttggaccgcctgccagcccagctgggccagtgtcggatgctcaagaaaagcgggcttgttgtggaagatcacctttttgataccctgccactcgaagtcaaagaggcattgaatcaagacataaatattccctttgcaaatgggatttaaactaagataatatatgcacagtgatgtgcaggaacaacttcctagattgcaagtgctcacgtacaagttattacaagataatgcattttaggagtagatacatcttttaaaataaaacagagaggatgcatagaaggctgatagaagacataactgaatgttcaatgtttgtagggttttaagtcattcatttccaaatcatttttttttttcttttggggaaagggaaggaaaaattataatcactaatcttggttctttttaaattgtttgtaacttggatgctgccgctactgaatgtttacaaattgcttgcctgctaaagtaaatgattaaattgacattttcttactat

SEQ ID NO: 250 - DNA, 390 bp, Homo sapiens
agaagctgtctatcgggctccagcggtcatgtccggcagaggaaagggcggaaaaggcttaggcaaagggggcgctaagcgccaccgcaaggtcttgagagacaacattcagggcatcaccaagcctgccattcggcgtctagctcggcgtggcggcgttaagcggatctctggcctcatttacgaggagacccgcggtgtgctgaaagtgttcttggagaatgtgattcgggacgcagtcacctacaccgagcacgccaagcgcaagaccgtcacagccatggatgtggtgtacgcgctcaagcgccaggggagaaccctctacggcttcggaggctaggcgccgctccagctttgcacgtttcgatcccaaaggccctttttgggccg

SEQ ID NO: 251 - DNA, 2411 bp, Homo sapiens
atttccttaatctatttaatcacaccctgacctgctttgaacataaccttcaggggaatgcacatagtcttttacagacaaaaaattattcagaagtatgcaaaaaactgccgtgaagcatacaaaactctgagtagtctgtacagtgaaatgcaaaaaatgaatgaacttgagaataaggctgaacctggaacacatttatgcattgatgtggaagatgcaatgaacatcactcgaaaactatggagtcgaactttcaactgttcagtcccttgcagtgacacagtgcctgtaattgctgtttctgtgttcattctctttctacctgttgtcttctaccttagtagctttcttcactcagagcaaaagaaacgcaaactcattctgcccaaacgtctcaagtccagtaccagttttgcaaatattcaggaaaattcaaactgagacctacaaaatggagaattgacatatcacgtgaatgaatggtggaagacacaacttggtttcagaaagaagataaactgtgatttgacaagtcaagctcttaagaaatacaaggacttcagatccatttttaaataagaattttcgatttttctttccttttccacttctttctaacagatttggatatttttaatttccaggcatagcaatgttatctattttaatgtgtatttgtcacaataacagaacatgcaagaacaatcattattttattttataggcatttgattactattctagacttctggtatcttcttactaacataaatatctcaagtagaaaagtttttgaaaactaacatttaaaaattaatcagttacagtaaagactttgaaaaagaaatgtacttgttaggaagtagcttaattaccccccattgcagtattattgttatatatatagttaatatgttgtacatcacaataatatataattcagtctctagtttccctagagtcatttttgaaaccactgattgcaaacctccctgacaatttttaaaagtagtaagccacattacatttatctttgtaaaaagatttatggtaactggtttcttacttgacttttataaatagtattttacatcttatttttgcctttatttcataagtaatttaaaaatcactggattgctttattatattcagggcaatatggattatttttataccaaggatttgcatcgtgaattacattaagttatttggcaatttataatttattactactttaaatcaaatgtagcattatcacactgtatttaaattgtcattttttaaaggaatattttcttcttaagatatatagaggattttggagaagagagacaggaggggtaaaaccagcttaaggttcagcgagcagaaagggacctgagaggatgctcactgtaagactgttggacagtggtgtgtattgaggggatgaatcggaacgatagtctcatgcagaaaatagtgagattaagatcatccttattgtttctaaattatttcaatcagatgaaagtgatacgattgaaatgaaatcacatagttcgtgctcagaaattctattttggtatgtttgtattagcctttagaaaaaacactccgtttcagaattgttcacagttttatttcttaggtttttagagttcaggatttcatttattaatttcttcttgcttttttggtggaaataggctttgttgtaaacattaagaatataaaatctcctctatatagaaacaagaattttgttaaaaagagaatttgaatcccttcctatactataaaatgctctatagggagacaaagtgtttcttttttcttttatgtttactgtttatgtggagtgaaatataaggctcttggatgtataacatactcaaaagctgttacactttctctgatctgctgtgatccactgaaaatgtgctggggtttgttctgctgtcactgtttatgctgctggaacttagcactgtcttgatttgaagcatatgattgagagccatttgaagcaatcttcattaatgcagataaaacaagtttacatgtgcagagttagaaaatgacatgttcaattctgtaagtggtgactttttgagcacctttcagtattatgtatttgtaaaaaccattgtttttggatataaagctaataagcactttaaaaaggaaaaggcagcctttactattttttctggttgagtcattgctctttagacctagcatcagcaatagatttcaaagataagtattaagcgctaccctaaagtgtgtaagtttttcattttgtcatattgaaaaatgatttgcatagtactgaatgttgacacacagcttatatgtatttacaagaatatctttaagtgtttttttgacacattaaaataaaggaaataaggaaattgtaa

SEQ ID NO: 252 - DNA, 3226 bp, Homo sapiens
cgcgagctaagcaggaggcggaggcggaggcggagggcgaggggcggggagcgccgcctggagcgcggcaggtcatattgaacattccagatacctatcattactcgatgctgttgataacagcaagatggctttgaactcagggtcaccaccagctattggaccttactatgaaaaccatggataccaaccggaaaacccctatcccgcacagcccactgtggtccccactgtctacgaggtgcatccggctcagtactacccgtcccccgtgccccagtacgccccgagggtcctgacgcaggcttccaaccccgtcgtctgcacgcagcccaaatccccatccgggacagtgtgcacctcaaagactaagaaagcactgtgcatcaccttgaccctggggaccttcctcgtgggagctgcgctggccgctggcctactctggaagttcatgggcagcaagtgctccaactctgggatagagtgcgactcctcaggtacctgcatcaacccctctaactggtgtgatggcgtgtcacactgccccggcggggaggacgagaatcggtgtgttcgcctctacggaccaaacttcatccttcagatgtactcatctcagaggaagtcctggcaccctgtgtgccaagacgactggaacgagaactacgggcgggcggcctgcagggacatgggctataagaataatttttactctagccaaggaatagtggatgacagcggatccaccagctttatgaaactgaacacaagtgccggcaatgtcgatatctataaaaaactgtaccacagtgatgcctgttcttcaaaagcagtggtttctttacgctgtatagcctgcggggtcaacttgaactcaagccgccagagcaggatcgtgggcggtgagagcgcgctcccgggggcctggccctggcaggtcagcctgcacgtccagaacgtccacgtgtgcggaggctccatcatcacccccgagtggatcgtgacagccgcccactgcgtggaaaaacctcttaacaatccatggcattggacggcatttgcggggattttgagacaatctttcatgttctatggagccggataccaagtagaaaaagtgatttctcatccaaattatgactccaagaccaagaacaatgacattgcgctgatgaagctgcagaagcctctgactttcaacgacctagtgaaaccagtgtgtctgcccaacccaggcatgatgctgcagccagaacagctctgctggatttccgggtggggggccaccgaggagaaagggaagacctcagaagtgctgaacgctgccaaggtgcttctcattgagacacagagatgcaacagcagatatgtctatgacaacctgatcacaccagccatgatctgtgccggcttcctgcaggggaacgtcgattcttgccagggtgacagtggagggcctctggtcacttcgaagaacaatatctggtggctgataggggatacaagctggggttctggctgtgccaaagcttacagaccaggagtgtacgggaatgtgatggtattcacggactggatttatcgacaaatgagggcagacggctaatccacatggtcttcgtccttgacgtcgttttacaagaaaacaatggggctggttttgcttccccgtgcatgatttactcttagagatgattcagaggtcacttcatttttattaaacagtgaacttgtctggctttggcactctctgccattctgtgcaggctgcagtggctcccctgcccagcctgctctccctaaccccttgtccgcaaggggtgatggccggctggttgtgggcactggcggtcaagtgtggaggagaggggtggaggctgccccattgagatcttcctgctgagtcctttccaggggccaattttggatgagcatggagctgtcacctctcagctgctggatgacttgagatgaaaaaggagagacatggaaagggagacagccaggtggcacctgcagcggctgccctctggggccacttggtagtgtccccagcctacctctccacaaggggattttgctgatgggttcttagagccttagcagccctggatggtggccagaaataaagggaccagcccttcatgggtggtgacgtggtagtcacttgtaaggggaacagaaacatttttgttcttatggggtgagaatatagacagtgcccttggtgcgagggaagcaattgaaaaggaacttgccctgagcactcctggtgcaggtctccacctgcacattgggtggggctcctgggagggagactcagccttcctcctcatcctccctgaccctgctcctagcaccctggagagtgcacatgccccttggtcctggcagggcgccaagtctggcaccatgttggcctcttcaggcctgctagtcactggaaattgaggtccatgggggaaatcaaggatgctcagtttaaggtacactgtttccatgttatgtttctacacattgctacctcagtgctcctggaaacttagcttttgatgtctccaagtagtccaccttcatttaactctttgaaactgtatcacctttgccaagtaagagtggtggcctatttcagctgctttgacaaaatgactggctcctgacttaacgttctataaatgaatgtgctgaagcaaagtgcccatggtggcggcgaagaagagaaagatgtgttttgttttggactctctgtggtcccttccaatgctgtgggtttccaaccaggggaagggtcccttttgcattgccaagtgccataaccatgagcactactctaccatggttctgcctcctggccaagcaggctggtttgcaagaatgaaatgaatgattctacagctaggacttaaccttgaaatggaaagtcttgcaatcccatttgcaggatccgtctgtgcacatgcctctgtagagagcagcattcccagggaccttggaaacagttggcactgtaaggtgcttgctccccaagacacatcctaaaaggtgttgtaatggtgaaaacgtcttccttctttattgccccttcttatttatgtgaacaactgtttgtctttttttgtatcttttttaaactgtaaagttcaattgtgaaaatgaatatcatgcaaataaattatgcgatttttttttcaaagcaaaaaaaaaaaaaaaaaaaaaaaaaaaaaaa

SEQ ID NO: 253 - DNA, 1838 bp, Homo sapiens; identical to SEQ ID NO: 122

SEQ ID NO: 254 - DNA, 1553 bp, Homo sapiens
cgaggctccgcaccagccgcgcttctgtccgcctgcagggcattccagaaagatgaggatatttgctgtctttatattcatgacctactggcatttgctgaacgcatttactgtcacggttcccaaggacctatatgtggtagagtatggtagcaatatgacaattgaatgcaaattcccagtagaaaaacaattagacctggctgcactaattgtctattgggaaatggaggataagaacattattcaatttgtgcatggagaggaagacctgaaggttcagcatagtagctacagacagagggcccggctgttgaaggaccagctctccctgggaaatgctgcacttcagatcacagatgtgaaattgcaggatgcaggggtgtaccgctgcatgatcagctatggtggtgccgactacaagcgaattactgtgaaagtcaatgccccatacaacaaaatcaaccaaagaattttggttgtggatccagtcacctctgaacatgaactgacatgtcaggctgagggctaccccaaggccgaagtcatctggacaagcagtgaccatcaagtcctgagtggtaagaccaccaccaccaattccaagagagaggagaagcttttcaatgtgaccagcacactgagaatcaacacaacaactaatgagattttctactgcacttttaggagattagatcctgaggaaaaccatacagctgaattggtcatcccagaactacctctggcacatcctccaaatgaaaggactcacttggtaattctgggagccatcttattatgccttggtgtagcactgacattcatcttccgtttaagaaaagggagaatgatggatgtgaaaaaatgtggcatccaagatacaaactcaaagaagcaaagtgatacacatttggaggagacgtaatccagcattggaacttctgatcttcaagcagggattctcaacctgtggtttaggggttcatcggggctgagcgtgacaagaggaaggaatgggcccgtgggatgcaggcaatgtgggacttaaaaggcccaagcactgaaaatggaacctggcgaaagcagaggaggagaatgaagaaagatggagtcaaacagggagcctggagggagaccttgatactttcaaatgcctgaggggctcatcgacgcctgtgacagggagaaaggatacttctgaacaaggagcctccaagcaaatcatccattgctcatcctaggaagacgggttgagaatccctaatttgagggtcagttcctgcagaagtgccctttgcctccactcaatgcctcaatttgttttctgcatgactgagagtctcagtgttggaacgggacagtatttatgtatgagtttttcctatttattttgagtctgtgaggtcttcttgtcatgtgagtgtggttgtgaatgatttcttttgaagatatattgtagtagatgttacaattttgtcgccaaactaaacttgctgcttaatgatttgctcacatctagtaaaacatggagtatttgtaaaaaaaaaaaaaaa

SEQ ID NO: 255 - DNA, 2007 bp, Homo sapiens; identical to SEQ ID NO: 215

SEQ ID NO: 256 - DNA, 3817 bp, Homo sapiens
atggccctggtgaccctgcagcgctcgcccacgcccagcgccgcctcctcctcggccagcaacagcgagttggaggctggcagcgaagaagatcgaaaattaaacctcagcttaagtgagagctttttcatggtgaaaggcgcagccctcttcttacaacagggaagcagccctcaaggccagcggagtcttcagcacccccacaagcatgcaggtgatctgcctcaacatcttcaggtgatgatcaaccttctgcgttgcgaagacagaatcaagctggcagtgcgcctggagagcgcctgggcggaccgggtccggtacatggtggtggtgtacagcagcgggcgccaggacaccgaggagaatatcttgctgggagtggacttttccagtaaggaaagtaaaagctgcaccattgggatggttctccgactgtggagcgacacgaaaatccaccttgatggagatggtgggttcagcgtgagcacagcaggaaggatgcacatatttaagcctgtgtctgtccaggccatgtggtctgccctgcaggtgcttcacaaggcctgcgaagtggcccggaggcacaactacttccccgggggtgtagctctcatctgggctacctactatgagagctgcatcagctccgagcagagctgcatcaacgagtggaacgccatgcaggacctggagtctacgcggcccgactcccccgcgctatttgtggacaagcccactgaaggggaaaggaccgagcgcctcatcaaagccaagctccgaagcatcatgatgagccaggatctagaaaatgtgacttccaaagagattcgtaatgaattagagaaacagatgaattgtaacttgaaggaactcaaggaatttatagacaatgagatgctacttatcttgggacagatggacaagccctcccttatcttcgatcatctttatctcggctctgaatggaatgcatccaatctggaggaactgcagggctcaggggttgattacattttaaatgttaccagagaaatcgataatttttttcctggcttatttgcatatcataacatccgagtctacgatgaagagaccacagacctcctcgcccactggaatgaagcgtatcattttataaacaaagcgaagaggaaccattccaagtgcctggtgcattgcaaaatgggcgtgagtcgctcggcctccacagtcatagcctatgcaatgaaggaattcggctggcctctggaaaaagcatataactatgtaaagcagaagcgcagcatcacgcgccccaacgcgggctttatgaggcagctgtctgagtatgaaggcatcttggatgcaagcaaacagcggcacaacaagctgtggcgtcagcagacagacagcagcctccagcagcctgtggatgaccctgcaggacctggcgacttcttgccagagaccccagatggcaccccggaaagccagctgcccttcttggatgatgccgcccagcccggcttagggccccccctcccctgctgtttccggcgactctcagacccccttctgccttcccctgaggatgaaactggcagcttggtccacctggaggatccggagagggaggctctgttggaggaagctgctccacctgcagaggtgcacaggccggccagacagccccagcaaggttccggactctgtgagaaggatgtgaagaagaaactagagtttgggagtcccaaaggtcggagcggctccttgctgcaggtggaggagacggaaagggaggagggcctgggagcagggaggtgggggcagcttccaacccagctcgatcaaaacctgctcaactcggagaacctaaacaacaacagcaagaggagctgtcccaacggcatggaggatgatgctatatttgggatccttaacaaagtgaagccttcctataaatcctgtgccgactgcatgtaccctacagccagcggggctcctgaggcctccagggagcgatgtgaggaccccaatgctcccgccatctgcacccagccagccttcctaccccacatcacgtcctcccctgtggcccacttggccagcaggtcccgtgttccggagaagccagcctctggcccaaccgaacctcccccgttcctaccaccagcaggctccaggagggcagacaccagtggccctggggctggagctgccctagagccaccagccagccttttggaaccttccagagagaccccaaaagtcctgccaaagtccctccttttgaagaattctcactgtgataagaaccctcccagcacagaagtggtaataaaggaagaatcgtcacccaagaaagatatgaagccagccaaggacctgaggcttctgttcagtaatgaatctgagaagccgacaaccaacagctacctgatgcagcaccaggagtccatcattcagctgcagaaggcaggcttggtccgcaagcacaccaaagagctagagcggctgaagagcgtgcctgcagacccagcacctccctccagggatggccctgccagcaggctggaggccagcatccccgaggagagccaggatccagccgcgctccacgagctgggccccctggttatgcccagccaggccgggagtgatgagaagtcagaggccgcccccgcttcattggaaggaggctcactgaagagcccccctcctttcttctaccgcctggaccacaccagtwgtttctcaaaagactttctgaagaccatctgctacacccccacctcctcttccatgagctccaacctgacccggagctccagcagcgatagcatccacagtgtccgtgggaagcccgggctggtgaagcagcggacgcaggagattgagacccggctccggctggcgggcctcaccgtctcttccccactgaagcgctcacactctcttgccaagctggggagtctcaccttctcaacggaagacctgtccagtgaggctgacccgtccaccgtcgctgactcccaggacaccactttgagtgaatcttccttcttgcatgagccccagggaaccccgagggacccagctgcaacctccaaaccatcagggaaacccgccccagaaaacttaaagagcccttcgtggatgagcaaaagctgacccgccttttgctgcgtcaggctgggcggatattttcatatgatccctccctcactttcactgtggatttggatcgaccccttacatcttgatttcccttaaacgagtgaagtcatcctaacttttcccctactcttgccatagagaggaggagaagaaactaaccaacatgcagcacaagaaggggagctgtcagtcgtgtggcctgggagaaccaggagccgccggccaggagacacaaaactccgctcccaccgtgtcttcaagaagaaccatgttttaggaagaacgtgcacacataggcgcacacatccagactgttcccttcgcatcctgcagaagagtcctggtggtggcagcctcaccgcggcacacgttctagctcattcttggcctcgcagaaaactctcggatggcaacattaagtcctacctctgttctcgctgcgctttttatttttaaaacacacgaatgaccaaggcttgttccagggaataatgctctgtctgaaagcgtttttccaaaaaaagaatttttcgttttgtgttttggttgggaccccagacgtgtcaagacttttaacccgacagccccaagcactgctgagtaaagtcatcagatgagtagtcccaaaaaaaaaaaaaaaaaaaaaaaaaaaaaaaaaaaa

SEQ ID NO: 257 - DNA, 531 bp, Homo sapiens
atagctcctatgctgaggaaacatattatgtatagattaatataaataaattactggaatggctaaatgaaaatcaatcaattcaaatggaaaatgtgaatccaattaaaaccataacttagaaaaaaaagaaaagaaatataaataagcaaaatataattcagagaaggttggtatatttgcagttggagcatcttggcttgaatgtctttatatatgactcagaagcctatcaaaagggctctgagcctcagacacaagatcaatgccttctttgtaagtgttccttacccaaaaatggctctgcaggagtgtccttgggcagccaggacacatagacagcctctgcaggaacacttggctctagaatttgggactgagggagatgcagcgagcccatcatgacgagtgcaaccagatgtggaagaagccaatgtgggcatgtcacgatctcatcagcatgccagtgtaggagaagcagaggctccggggtctccctgctgatctggaagatcttgtctgctgcttctg

SEQ ID NO: 258 - DNA, 424 bp, Homo sapiens
tttttttttttttttaacagagttgaaatgtttggatttattgtagcattactatcaggaatacacattgattatggtattgctatcaagaatacatataaatacatgcctgaagctataagtgagataagagatattccagggttagtcaaaagttaatctttgagttccagaagtctggatgaaaatgagatgagactgcaaattttgttgttaggcagtcaccatttatgacccttggcagggagggcaggaatggtggttatattgtgaactgaatgaaaactgagaactaatcagcatcatgtgggcctgaagcatttattgctaccagtgattagttgtaagaccttcggactatgtaactgtaatgaactataatgaacatgagaaaacaactcttttttttttttttttttttttt

SEQ ID NO: 259 - DNA, 392 bp, Homo sapiens
tttgtaatacacaaaccagttttttattggaaaaaaacacacagatacaagtagagacagataaactatttacagtagaacaagtgacagagaataataaatgtaatgaaagatgtatagttcctctagtaagtaataaattttaaagcacaagataccatttttcacccattagatggacaaaaattaaaagatggatactttctagcatcgctaagcatgtaggcaagtggatacttccccacagtcttaatagattttggggaaatttggtcatgtctcttcaaaaactaaattgttagttttgttttgatttttcagagacagggtttcactctgtttaaaaaaaaaaaaagaaaggttaagatttggactgttgatggggataggaa

SEQ ID NO: 260 - DNA, 531 bp, Homo sapiens
gcacgagatttttggatatgccttttttggaagagacttagactttatccttattgttgttagtgttgttaatattcgttgcttcagcccacggtgccttggtctctccacaatcaaatggaggatcccccaagcagcttcattacagagtgatattgggaaagtgagatcctctcaccattttgccaagatactctaaaatgacatccaagtttaccagtagaaagacacaggatgcacagaatgggcatgaccttcagctcacgagcacacctggagaaattcagaaccaggttctgaatcatcacgattgccttttgcatgaaaacatcggctggtgatgtgacttctcttcaggccatgagcctaacaccctgccggttttcatgcccgctgcagtaatggacgtttgtgtgaagaaatgaactgtggagtacaaaatgctttgagtctttccgattgctcattaattcacttttttgttacttctttccaaaatggaagtgctgaagccatggtctttctgcccct

SEQ ID NO: 261 - DNA, 466 bp, Homo sapiens
tttttttttttttttttttttcaggggccaaggcaaaattggtttattaaaacagctatttgcaatggcagattttaaagacaaagacacaaataagtcaatggatataaaaaactgtaaaaggctgtaaatacatgatcatcatttataaaatcaacaacatctcatgtatctggcactttatggaaacccattttacattttatcatttggaataaatgaagggttttttttcctaaataaaatactttcctaccccataagctacgctttcaaagtgctcctttcttctggtacagtacccatctgacaggtgctcaaatctcctttagtcctctgccaatggacacacttttatctcttcattcagcttccttcctgagtctgctatggagttggaaatcaaacagccatgtttgttagaattgtttgtaaattaagattaaatagaatacaggttgactat

SEQ ID NO: 262 - DNA, 447 bp, Homo sapiens
ttttttttttttttttttagcatatactattaatttatttattcagcaagcatattttgaacaaatctgtaagatttcctcaaatttattatataattctcatattaagatgaactaagtttatatgtaagataattcaaaaaaatgctggattaaataccaactctaatataattgcttcctatgaattttatttttaatttgcatagaagtataacctgaggcagagcgtaacattgcctccactgttgcatggatcatgatgagattttgccacaccaggtcctcctaggcttttcagttttactttggcctcttgggattctaaaaggcactagcatctgtgagcaaaggtgaaactaggtgcaaagcatctagattctaggcactgaaatcggctgaaggacacctacagcaaatacgtgtaaggacatcttgagctttttg

SEQ ID NO: 263 - DNA, 6628 bp, Homo sapiens
cgaaattgaaccggagccatcttgggcccggcgcgcagacccgcggagtttcccgtgccgacgccccggggccacttccagtgcggagtagcggaggcgtgggggcctcgaggggctggcgcggtccagcggtcgggccagggtcgtgccgccggcgggtcgggccgggcaatgcctcgcgggcgcaatgaatccgcggcaggggtattccctcagcggatactacacccatccatttcaaggctatgagcacagacagctcagataccagcagcctgggccaggatcttcccccagtagtttcctgcttaagcaaatagaatttctcaaggggcagctcccagaagcaccggtgattggaaagcagacaccgtcactgccaccttccctcccaggactccggccaaggtttccagtactacttgcctccagtaccagaggcaggcaagtggacatcaggggtgtccccaggggcgtgcatctcggaagtcaggggctccagagagggttccagcatccttcaccacgtggcaggagtctgccacagagaggtgttgattgcctttcctcacatttccaggaactgagtatctaccaagatcaggaacaaaggatcttaaagttcctggaagagcttggggaagggaaggccaccacagcacatgatctgtctgggaaacttgggactccgaagaaagaaatcaatcgagttttatactccctggcaaagaagggcaagctacagaaagaggcaggaacaccccctttgtggaaaatcgcggtctccactcaggcttggaaccagcacagcggagtggtaagaccagacggtcatagccaaggagccccaaactcagacccgagtttggaaccggaagacagaaactccacatctgtctcagaagatcttcttgagccttttattgcagtctcagctcaggcttggaaccagcacagcggagtggtaagaccagacagtcatagccaaggatccccaaactcagacccaggtttggaacctgaagacagcaactccacatctgccttggaagatcctcttgagtttttagacatggccgagatcaaggagaaaatctgcgactatctcttcaatgtgtctgactcctctgccctgaatttggctaaaaatattggccttaccaaggcccgagatataaatgctgtgctaattgacatggaaaggcagggggatgtctatagacaagggacaacccctcccatatggcatttgacagacaagaagcgagagaggatgcaaatcaagagaaatacgaacagtgttcctgaaaccgctccagctgcaatccctgagaccagaagaaacgcagagttcctcacctgtaatatacccacatcaaatgcctcaaataacatggtaaccacagaaaaagtggagaatgggcaggaacctgtcataaagttagaaaacaggcaagaggccagaccagaaccagcaagactgaaaccacctgttcattacaatggcccctcaaaagcagggtatgttgactttgaaaatggccagtgggccacagatgacatcccagatgacttgaatagtatccgcgcagcaccaggtgagtttcgagccatcatggagatgccctccttctacagtcatggcttgccacggtgttcaccctacaagaaactgacagagtgccagctgaagaaccccatcagcgggctgttagaatatgcccagttcgctagtcaaacctgtgagttcaacatgatagagcagagtggaccaccccatgaacctcgatttaaattccaggttgtcatcaatggccgagagtttcccccagctgaagctggaagcaagaaagtggccaagcaggatgcagctatgaaagccatgacaattctgctagaggaagccaaagccaaggacagtggaaaatcagaagaatcatcccactattccacagagaaagaatcagagaagactgcagagtcccagacccccaccccttcagccacatccttcttttctgggaagagccccgtcaccacactgcttgagtgtatgcacaaattggggaactcctgcgaattccgtctcctgtccaaagaaggccctgcccatgaacccaagttccaatactgtgttgcagtgggagcccaaactttccccagtgtgagtgctcccagcaagaaagtggcaaagcagatggccgcagaggaagccatgaaggccctgcatggggaggcgaccaactccatggcttctgataaccagcctgaaggtatgatctcagagtcacttgataacttggaatccatgatgcccaacaaggtcaggaagattggcgagctcgtgagatacctgaacaccaaccctgtgggtggccttttggagtacgcccgctcccatggctttgctgctgaattcaagttggtcgaccagtccggacctcctcacgagcccaagttcgtttaccaagcaaaagttgggggtcgctggttcccagccgtctgcgcacacagcaagaagcaaggcaagcaggaagcagcagatgcggctctccgtgtcttgattggggagaacgagaaggcagaacgcatgggtttcacagaggtaaccccagtgacaggggccagtctcagaagaactatgctcctcctctcaaggtccccagaagcacagccaaagacactccctctcactggcagcaccttccatgaccagatagccatgctgagccaccggtgcttcaacactctgactaacagcttccagccctccttgctcggccgcaagattctggccgccatcattatgaaaaaagactctgaggacatgggtgtcgtcgtcagcttgggaacagggaatcgctgtgttaaaggagattctctcagcctaaaaggagaaactgtcaatgactgccatgcagaaataatctcccggagaggcttcatcaggtttctctacagtgagttaatgaaatacaactcccagactgcgaaggatagtatatttgaacctgctaagggaggagaaaagctccaaataaaaaagactgtgtcattccatctgtatatcagcactgctccgtgtggagatggcgccctctttgacaagtcctgcagcgaccgtgctatggaaagcacagaatcccgccactaccctgtcttcgagaatcccaaacaaggaaagctccgcaccaaggtggagaacggagaaggcacaatccctgtggaatccagtgacattgtgcctacgtgggatggcattcggctcggggagagactccgtaccatgtcctgtagtgacaaaatcctacgctggaacgtgctgggcctgcaaggggcactgttgacccacttcctgcagcccatttatctcaaatctgtcacattgggttaccttttcagccaagggcatctgacccgtgctatttgctgtcgtgtgacaagagatgggagtgcatttgaggatggactacgacatccctttattgtcaaccaccccaaggttggcagagtcagcatatatgattccaaaaggcaatccgggaagactaaggagacaagcgtcaactggtgtctggctgatggctatgacctggagatcctggacggtaccagaggcactgtggatgggccacggaatgaattgtcccgggtctccaaaaagaacatttttcttctatttaagaagctctgctccttccgttaccgcagggatctactgagactctcctatggtgaggccaagaaagctgcccgtgactacgagacggccaagaactacttcaaaaaaggcctgaaggatatgggctatgggaactggattagcaaaccccaggaggaaaagaacttttatctctgcccagtatagtatgctccagtgacagatggattagggtgtgtcatactagggtgtgagagaggtaggtcgtagcattcctcatcacatggtcaggggatttttttttctccttttttttttctttttaagccataattggtgatactgaaaactttgggttcccatttatcctgctttctttgggattgctaggcaaggtctggccaggccccccttttttcccccaagtgaagaggcagaaacctaagaagttatcttttctttctacccaaagcatacatagtcactgagcacctgcggtccatttcctcttaaaagttttgttttgatttgtttccatttcctttccctttgtgtttgctacactgacctcttgcggtcttgattaggtttcagtcaactctggatcatgtcagggactgataatttcatttgtggattacgcagacccctctacttcccctctttcccttctgagattctttccttgtgatctgaatgtctccttttccccctcagagggcaaagaggtgaacataaaggatttggtgaaacatttgtaagggtaggagttgaaaactgcagttcccagtgccacggaagtgtgattggagcctgcagataatgcccagccatcctcccatcctgcactttagccagctgcagggcgggcaaggcaaggaaagctgcttccctggaagtgtatcactttctccggcagctgggaagtctagaaccagccagactgggttaagggagctgctcaagcaatagcagaggtttcacccggcaggatgacacagaccacttcccagggagcacgggcatgccttggaatattgccaagcttccagctgcctcttctcctaaagcattcctaggaatattttccccgccaatgctgggcgtacaccctagccaacgggacaaatcctagagggtataaaatcatctctgctcagataatcatgacttagcaagaataagggcaaaaaatcctgttggcttaacgtcactgttccacccggtgtaatatctctcatgacagtgacaccaagggaagttgactaagtcacatgtaaattaggagtgttttaaagaatgccatagatgttgattcttaactgctacagataacctgtaattgagcagatttaaaattcaggcatacttttccatttatccaagtgctttcatttttccagatggcttcagaagtaggctcgtgggcagggcgcagacctgatctttctagggttgacatagaaagcagtagttgtgggtgaaagggcaggttgtcttcaaactctgtgaggtagaatcctttgtctatacctccatgaacattgactcgtgtgttcagagcctttggcctctctgtggagtctggctctctggctcctgtgcattctttgaatagtcactcgtaaaaactgtcagtgcttgaaactgtttcctttactcatgttgaagggactttgttggcttttagagtgttggtcatgactccaagagcagagcagggaagagcccaagcatagacttggtgccgtggtgatggctgcagtccagttttgtgatgctgcttttacgtgtccctcgataacagtcagctagacacactcaggaggactactgaggctctgcgaccttcaggagctgagcctgcctctctcctttagatgacagaccttcatctgggaacgtgctgagccagcaccctcagatgatttccctccaaactgctgactaggtcatcctctgtctggtagagacattcacatctttgcttttattctatgctctctgtacttttgaccaaaaattgaccaaagtaagaaaatgcaagttctaaaaatagactaaggatgcctttgcagaacaccaaagcatcccaaggaactggtagggaagtggcgcctgtctcctggagtggaagaggcctgctccctggctctgggtctgctgggggcacagtaaatcagtcttggcacccacatccagggcagagaggtctgtggttctcagcatcagaaggcagcgcagcccctctcctcttcaggctacagggttgtcacctgctgagtcctcaggttgtttggcctctctggtccatcttgggcattaggttctccagcagagctctggccagctgcctcttctttaactgggaacacaggctctcacaagatcagaacccccactcacccccaagatcttatctagcaagcctgtagtattcagtttctgttgtaggaagagagcgaggcatccctgaattccacgcatctgctggaaacgagccgtgtcagatcgcacatccctgcgcccccatgcccccatgcccctctgagtcacacaggacagaggaggcagagcttctgcccactgttatcttcactttctttgtccagtcttttgtttttaataagcagtgaccctccctactcttctttttaatgatttttgtagttgatttgtctgaactgtggctactgtgcattccttgaataatcacttgtaaaaattgtcagtgcttgaagctgtttcctttactcacattgaagggacttcgttggttttttggagtcttggttgtgactccaagagcagagtgaggaagacccccaagcatagactcgggtactgtgatgatggctgcagtccagttttatgattctgcttttatgtgtcccttgataacagtgacttaacaatatacattcctcataaataaaaaaaaaacaagaatctgaattcctgcagccc

SEQ ID NO: 264 - DNA, 6550 bp, Homo sapiens
cgaaattgaaccggagccatcttgggcccggcgcgcagacccgcggagtttcccgtgccgacgccccggggccacttccagtgcggagtagcggaggcgtgggggcctcgaggggctggcgcggtccagcggtcgggccagggtcgtgccgccggcgggtcgggccgggcaatgcctcgcgggcgcaatgaatccgcggcaggggtattccctcagcggatactacacccatccatttcaaggctatgagcacagacagctcagataccagcagcctgggccaggatcttcccccagtagtttcctgcttaagcaaatagaatttctcaaggggcagctcccagaagcaccggtgattggaaagcagacaccgtcactgccaccttccctcccaggactccggccaaggtttccagtactacttgcctccagtaccagaggcaggcaagtggacatcaggggtgtccccaggggcgtgcatctcggaagtcaggggctccagagagggttccagcatccttcaccacgtggcaggagtctgccacagagaggtgttgattgcctttcctcacatttccaggaactgagtatctaccaagatcaggaacaaaggatcttaaagttcctggaagagcttggggaagggaaggccaccacagcacatgatctgtctgggaaacttgggactccgaagaaagaaatcaatcgagttttatactccctggcaaagaagggcaagctacagaaagaggcaggaacaccccctttgtggaaaatcgcggtctccactcaggcttggaaccagcacagcggagtggtaagaccagacggtcatagccaaggagccccaaactcagacccgagtttggaaccggaagacagaaactccacatctgtctcagaagatcttcttgagccttttattgcagtctcagctcaggcttggaaccagcacagcggagtggtaagaccagacagtcatagccaaggatccccaaactcagacccaggtttggaacctgaagacagcaactccacatctgccttggaagatcctcttgagtttttagacatggccgagatcaaggagaaaatctgcgactatctcttcaatgtgtctgactcctctgccctgaatttggctaaaaatattggccttaccaaggcccgagatataaatgctgtgctaattgacatggaaaggcagggggatgtctatagacaagggacaacccctcccatatggcatttgacagacaagaagcgagagaggatgcaaatcaagagaaatacgaacagtgttcctgaaaccgctccagctgcaatccctgagaccagaagaaacgcagagttcctcacctgtaatatacccacatcaaatgcctcaaataacatggtaaccacagaaaaagtggagaatgggcaggaacctgtcataaagttagaaaacaggcaagaggccagaccagaaccagcaagactgaaaccacctgttcattacaatggcccctcaaaagcagggtatgttgactttgaaaatggccagtgggccacagatgacatcccagatgacttgaatagtatccgcgcagcaccaggtgagtttcgagccatcatggagatgccctccttctacagtcatggcttgccacggtgttcaccctacaagaaactgacagagtgccagctgaagaaccccatcagcgggctgttagaatatgcccagttcgctagtcaaacctgtgagttcaacatgatagagcagagtggaccaccccatgaacctcgatttaaattccaggttgtcatcaatggccgagagtttcccccagctgaagctggaagcaagaaagtggccaagcaggatgcagctatgaaagccatgacaattctgctagaggaagccaaagccaaggacagtggaaaatcagaagaatcatcccactattccacagagaaagaatcagagaagactgcagagtcccagacccccaccccttcagccacatccttcttttctgggaagagccccgtcaccacactgcttgagtgtatgcacaaattggggaactcctgcgaattccgtctcctgtccaaagaaggccctgcccatgaacccaagttccaatactgtgttgcagtgggagcccaaactttccccagtgtgagtgctcccagcaagaaagtggcaaagcagatggccgcagaggaagccatgaaggccctgcatggggaggcgaccaactccatggcttctgataaccagcctgaaggtatgatctcagagtcacttgataacttggaatccatgatgcccaacaaggtcaggaagattggcgagctcgtgagatacctgaacaccaaccctgtgggtggccttttggagtacgcccgctcccatggctttgctgctgaattcaagttggtcgaccagtccggacctcctcacgagcccaagttcgtttaccaagcaaaagttgggggtcgctggttcccagccgtctgcgcacacagcaagaagcaaggcaagcaggaagcagcagatgcggctctccgtgtcttgattggggagaacgagaaggcagaacgcatgggtttcacagagctccctctcactggcagcaccttccatgaccagatagccatgctgagccaccggtgcttcaacactctgactaacagcttccagccctccttgctcggccgcaagattctggccgccatcattatgaaaaaagactctgaggacatgggtgtcgtcgtcagcttgggaacagggaatcgctgtgttaaaggagattctctcagcctaaaaggagaaactgtcaatgactgccatgcagaaataatctcccggagaggcttcatcaggtttctctacagtgagttaatgaaatacaactcccagactgcgaaggatagtatatttgaacctgctaagggaggagaaaagctccaaataaaaaagactgtgtcattccatctgtatatcagcactgctccgtgtggagatggcgccctctttgacaagtcctgcagcgaccgtgctatggaaagcacagaatcccgccactaccctgtcttcgagaatcccaaacaaggaaagctccgcaccaaggtggagaacggagaaggcacaatccctgtggaatccagtgacattgtgcctacgtgggatggcattcggctcggggagagactccgtaccatgtcctgtagtgacaaaatcctacgctggaacgtgctgggcctgcaaggggcactgttgacccacttcctgcagcccatttatctcaaatctgtcacattgggttaccttttcagccaagggcatctgacccgtgctatttgctgtcgtgtgacaagagatgggagtgcatttgaggatggactacgacatccctttattgtcaaccaccccaaggttggcagagtcagcatatatgattccaaaaggcaatccgggaagactaaggagacaagcgtcaactggtgtctggctgatggctatgacctggagatcctggacggtaccagaggcactgtggatgggccacggaatgaattgtcccgggtctccaaaaagaacatttttcttctatttaagaagctctgctccttccgttaccgcagggatctactgagactctcctatggtgaggccaagaaagctgcccgtgactacgagacggccaagaactacttcaaaaaaggcctgaaggatatgggctatgggaactggattagcaaaccccaggaggaaaagaacttttatctctgcccagtatagtatgctccagtgacagatggattagggtgtgtcatactagggtgtgagagaggtaggtcgtagcattcctcatcacatggtcaggggatttttttttctccttttttttttctttttaagccataattggtgatactgaaaactttgggttcccatttatcctgctttctttgggattgctaggcaaggtctggccaggccccccttttttcccccaagtgaagaggcagaaacctaagaagttatcttttctttctacccaaagcatacatagtcactgagcacctgcggtccatttcctcttaaaagttttgttttgatttgtttccatttcctttccctttgtgtttgctacactgacctcttgcggtcttgattaggtttcagtcaactctggatcatgtcagggactgataatttcatttgtggattacgcagacccctctacttcccctctttcccttctgagattctttccttgtgatctgaatgtctccttttccccctcagagggcaaagaggtgaacataaaggatttggtgaaacatttgtaagggtaggagttgaaaactgcagttcccagtgccacggaagtgtgattggagcctgcagataatgcccagccatcctcccatcctgcactttagccagctgcagggcgggcaaggcaaggaaagctgcttccctggaagtgtatcactttctccggcagctgggaagtctagaaccagccagactgggttaagggagctgctcaagcaatagcagaggtttcacccggcaggatgacacagaccacttcccagggagcacgggcatgccttggaatattgccaagcttccagctgcctcttctcctaaagcattcctaggaatattttccccgccaatgctgggcgtacaccctagccaacgggacaaatcctagagggtataaaatcatctctgctcagataatcatgacttagcaagaataagggcaaaaaatcctgttggcttaacgtcactgttccacccggtgtaatatctctcatgacagtgacaccaagggaagttgactaagtcacatgtaaattaggagtgttttaaagaatgccatagatgttgattcttaactgctacagataacctgtaattgagcagatttaaaattcaggcatacttttccatttatccaagtgctttcatttttccagatggcttcagaagtaggctcgtgggcagggcgcagacctgatctttctagggttgacatagaaagcagtagttgtgggtgaaagggcaggttgtcttcaaactctgtgaggtagaatcctttgtctatacctccatgaacattgactcgtgtgttcagagcctttggcctctctgtggagtctggctctctggctcctgtgcattctttgaatagtcactcgtaaaaactgtcagtgcttgaaactgtttcctttactcatgttgaagggactttgttggcttttagagtgttggtcatgactccaagagcagagcagggaagagcccaagcatagacttggtgccgtggtgatggctgcagtccagttttgtgatgctgcttttacgtgtccctcgataacagtcagctagacacactcaggaggactactgaggctctgcgaccttcaggagctgagcctgcctctctcctttagatgacagaccttcatctgggaacgtgctgagccagcaccctcagatgatttccctccaaactgctgactaggtcatcctctgtctggtagagacattcacatctttgcttttattctatgctctctgtacttttgaccaaaaattgaccaaagtaagaaaatgcaagttctaaaaatagactaaggatgcctttgcagaacaccaaagcatcccaaggaactggtagggaagtggcgcctgtctcctggagtggaagaggcctgctccctggctctgggtctgctgggggcacagtaaatcagtcttggcacccacatccagggcagagaggtctgtggttctcagcatcagaaggcagcgcagcccctctcctcttcaggctacagggttgtcacctgctgagtcctcaggttgtttggcctctctggtccatcttgggcattaggttctccagcagagctctggccagctgcctcttctttaactgggaacacaggctctcacaagatcagaacccccactcacccccaagatcttatctagcaagcctgtagtattcagtttctgttgtaggaagagagcgaggcatccctgaattccacgcatctgctggaaacgagccgtgtcagatcgcacatccctgcgcccccatgcccccatgcccctctgagtcacacaggacagaggaggcagagcttctgcccactgttatcttcactttctttgtccagtcttttgtttttaataagcagtgaccctccctactcttctttttaatgatttttgtagttgatttgtctgaactgtggctactgtgcattccttgaataatcacttgtaaaaattgtcagtgcttgaagctgtttcctttactcacattgaagggacttcgttggttttttggagtcttggttgtgactccaagagcagagtgaggaagacccccaagcatagactcgggtactgtgatgatggctgcagtccagttttatgattctgcttttatgtgtcccttgataacagtgacttaacaatatacattcctcataaataaaaaaaaaacaagaatctgaattcctgcagccc

SEQ ID NO: 265 - DNA, 6493 bp, Homo sapiens
cgaaattgaaccggagccatcttgggcccggcgcgcagacccgcggagtttcccgtgccgacgccccggggccacttccagtgcggagtagcggaggcgtgggggcctcgaggggctggcgcggtccagcggtcgggccagggtcgtgccgccggcgggtcgggccgggcaatgcctcgcgggcgcaatgaatccgcggcaggggtattccctcagcggatactacacccatccatttcaaggctatgagcacagacagctcagataccagcagcctgggccaggatcttcccccagtagtttcctgcttaagcaaatagaatttctcaaggggcagctcccagaagcaccggtgattggaaagcagacaccgtcactgccaccttccctcccaggactccggccaaggtttccagtactacttgcctccagtaccagaggcaggcaagtggacatcaggggtgtccccaggggcgtgcatctcggaagtcaggggctccagagagggttccagcatccttcaccacgtggcaggagtctgccacagagaggtgttgattgcctttcctcacatttccaggaactgagtatctaccaagatcaggaacaaaggatcttaaagttcctggaagagcttggggaagggaaggccaccacagcacatgatctgtctgggaaacttgggactccgaagaaagaaatcaatcgagttttatactccctggcaaagaagggcaagctacagaaagaggcaggaacaccccctttgtggaaaatcgcggtctccactcaggcttggaaccagcacagcggagtggtaagaccagacggtcatagccaaggagccccaaactcagacccgagtttggaaccggaagacagaaactccacatctgtctcagaagatcttcttgagccttttattgcagtctcagctcaggcttggaaccagcacagcggagtggtaagaccagacagtcatagccaaggatccccaaactcagacccaggtttggaacctgaagacagcaactccacatctgccttggaagatcctcttgagtttttagacatggccgagatcaaggagaaaatctgcgactatctcttcaatgtgtctgactcctctgccctgaatttggctaaaaatattggccttaccaaggcccgagatataaatgctgtgctaattgacatggaaaggcagggggatgtctatagacaagggacaacccctcccatatggcatttgacagacaagaagcgagagaggatgcaaatcaagagaaatacgaacagtgttcctgaaaccgctccagctgcaatccctgagaccagaagaaacgcagagttcctcacctgtaatatacccacatcaaatgcctcaaataacatggtaaccacagaaaaagtggagaatgggcaggaacctgtcataaagttagaaaacaggcaagaggccagaccagaaccagcaagactgaaaccacctgttcattacaatggcccctcaaaagcagggtatgttgactttgaaaatggccagtgggccacagatgacatcccagatgacttgaatagtatccgcgcagcaccaggtgagtttcgagccatcatggagatgccctccttctacagtcatggcttgccacggtgttcaccctacaagaaactgacagagtgccagctgaagaaccccatcagcgggctgttagaatatgcccagttcgctagtcaaacctgtgagttcaacatgatagagcagagtggaccaccccatgaacctcgatttaaattccaggttgtcatcaatggccgagagtttcccccagctgaagctggaagcaagaaagtggccaagcaggatgcagctatgaaagccatgacaattctgctagaggaagccaaagccaaggacagtggaaaatcagaagaatcatcccactattccacagagaaagaatcagagaagactgcagagtcccagacccccaccccttcagccacatccttcttttctgggaagagccccgtcaccacactgcttgagtgtatgcacaaattggggaactcctgcgaattccgtctcctgtccaaagaaggccctgcccatgaacccaagttccaatactgtgttgcagtgggagcccaaactttccccagtgtgagtgctcccagcaagaaagtggcaaagcagatggccgcagaggaagccatgaaggccctgcatggggaggcgaccaactccatggcttctgataaccaggtcaggaagattggcgagctcgtgagatacctgaacaccaaccctgtgggtggccttttggagtacgcccgctcccatggctttgctgctgaattcaagttggtcgaccagtccggacctcctcacgagcccaagttcgtttaccaagcaaaagttgggggtcgctggttcccagccgtctgcgcacacagcaagaagcaaggcaagcaggaagcagcagatgcggctctccgtgtcttgattggggagaacgagaaggcagaacgcatgggtttcacagagctccctctcactggcagcaccttccatgaccagatagccatgctgagccaccggtgcttcaacactctgactaacagcttccagccctccttgctcggccgcaagattctggccgccatcattatgaaaaaagactctgaggacatgggtgtcgtcgtcagcttgggaacagggaatcgctgtgttaaaggagattctctcagcctaaaaggagaaactgtcaatgactgccatgcagaaataatctcccggagaggcttcatcaggtttctctacagtgagttaatgaaatacaactcccagactgcgaaggatagtatatttgaacctgctaagggaggagaaaagctccaaataaaaaagactgtgtcattccatctgtatatcagcactgctccgtgtggagatggcgccctctttgacaagtcctgcagcgaccgtgctatggaaagcacagaatcccgccactaccctgtcttcgagaatcccaaacaaggaaagctccgcaccaaggtggagaacggagaaggcacaatccctgtggaatccagtgacattgtgcctacgtgggatggcattcggctcggggagagactccgtaccatgtcctgtagtgacaaaatcctacgctggaacgtgctgggcctgcaaggggcactgttgacccacttcctgcagcccatttatctcaaatctgtcacattgggttaccttttcagccaagggcatctgacccgtgctatttgctgtcgtgtgacaagagatgggagtgcatttgaggatggactacgacatccctttattgtcaaccaccccaaggttggcagagtcagcatatatgattccaaaaggcaatccgggaagactaaggagacaagcgtcaactggtgtctggctgatggctatgacctggagatcctggacggtaccagaggcactgtggatgggccacggaatgaattgtcccgggtctccaaaaagaacatttttcttctatttaagaagctctgctccttccgttaccgcagggatctactgagactctcctatggtgaggccaagaaagctgcccgtgactacgagacggccaagaactacttcaaaaaaggcctgaaggatatgggctatgggaactggattagcaaaccccaggaggaaaagaacttttatctctgcccagtatagtatgctccagtgacagatggattagggtgtgtcatactagggtgtgagagaggtaggtcgtagcattcctcatcacatggtcaggggatttttttttctccttttttttttctttttaagccataattggtgatactgaaaactttgggttcccatttatcctgctttctttgggattgctaggcaaggtctggccaggccccccttttttcccccaagtgaagaggcagaaacctaagaagttatcttttctttctacccaaagcatacatagtcactgagcacctgcggtccatttcctcttaaaagttttgttttgatttgtttccatttcctttccctttgtgtttgctacactgacctcttgcggtcttgattaggtttcagtcaactctggatcatgtcagggactgataatttcatttgtggattacgcagacccctctacttcccctctttcccttctgagattctttccttgtgatctgaatgtctccttttccccctcagagggcaaagaggtgaacataaaggatttggtgaaacatttgtaagggtaggagttgaaaactgcagttcccagtgccacggaagtgtgattggagcctgcagataatgcccagccatcctcccatcctgcactttagccagctgcagggcgggcaaggcaaggaaagctgcttccctggaagtgtatcactttctccggcagctgggaagtctagaaccagccagactgggttaagggagctgctcaagcaatagcagaggtttcacccggcaggatgacacagaccacttcccagggagcacgggcatgccttggaatattgccaagcttccagctgcctcttctcctaaagcattcctaggaatattttccccgccaatgctgggcgtacaccctagccaacgggacaaatcctagagggtataaaatcatctctgctcagataatcatgacttagcaagaataagggcaaaaaatcctgttggcttaacgtcactgttccacccggtgtaatatctctcatgacagtgacaccaagggaagttgactaagtcacatgtaaattaggagtgttttaaagaatgccatagatgttgattcttaactgctacagataacctgtaattgagcagatttaaaattcaggcatacttttccatttatccaagtgctttcatttttccagatggcttcagaagtaggctcgtgggcagggcgcagacctgatctttctagggttgacatagaaagcagtagttgtgggtgaaagggcaggttgtcttcaaactctgtgaggtagaatcctttgtctatacctccatgaacattgactcgtgtgttcagagcctttggcctctctgtggagtctggctctctggctcctgtgcattctttgaatagtcactcgtaaaaactgtcagtgcttgaaactgtttcctttactcatgttgaagggactttgttggcttttagagtgttggtcatgactccaagagcagagcagggaagagcccaagcatagacttggtgccgtggtgatggctgcagtccagttttgtgatgctgcttttacgtgtccctcgataacagtcagctagacacactcaggaggactactgaggctctgcgaccttcaggagctgagcctgcctctctcctttagatgacagaccttcatctgggaacgtgctgagccagcaccctcagatgatttccctccaaactgctgactaggtcatcctctgtctggtagagacattcacatctttgcttttattctatgctctctgtacttttgaccaaaaattgaccaaagtaagaaaatgcaagttctaaaaatagactaaggatgcctttgcagaacaccaaagcatcccaaggaactggtagggaagtggcgcctgtctcctggagtggaagaggcctgctccctggctctgggtctgctgggggcacagtaaatcagtcttggcacccacatccagggcagagaggtctgtggttctcagcatcagaaggcagcgcagcccctctcctcttcaggctacagggttgtcacctgctgagtcctcaggttgtttggcctctctggtccatcttgggcattaggttctccagcagagctctggccagctgcctcttctttaactgggaacacaggctctcacaagatcagaacccccactcacccccaagatcttatctagcaagcctgtagtattcagtttctgttgtaggaagagagcgaggcatccctgaattccacgcatctgctggaaacgagccgtgtcagatcgcacatccctgcgcccccatgcccccatgcccctctgagtcacacaggacagaggaggcagagcttctgcccactgttatcttcactttctttgtccagtcttttgtttttaataagcagtgaccctccctactcttctttttaatgatttttgtagttgatttgtctgaactgtggctactgtgcattccttgaataatcacttgtaaaaattgtcagtgcttgaagctgtttcctttactcacattgaagggacttcgttggttttttggagtcttggttgtgactccaagagcagagtgaggaagacccccaagcatagactcgggtactgtgatgatggctgcagtccagttttatgattctgcttttatgtgtcccttgataacagtgacttaacaatatacattcctcataaataaaaaaaaaacaagaatctgaattcctgcagccc

SEQ ID NO: 266 - DNA, 6410 bp, Homo sapiens
acctgcacagtggcgagaccaaggacccagagagaaaggtgagagtgcagccggggaggctgaggatcggcggagctggaagagtgagggtgaaggcaagaagtagagcacagaagcaaagattttaagaggaaagaagacatctgaacccaacaccaccctaaaccacaggctgcagggttggcatgctccgtgcaagaccagaggcactgatgctcctgggagctcttctgactggatccctgggtccatcgggcagtcaggacgcactctcactgccctgggaagtgcagcgctatgacggctggtttaacaacctgaggcaccacgagcgtggtgctgttggctgccggttgcagcgccgcgtaccagccaattacgccgacggtgtgtatcaggctctggaggagccgcagctgcccaacccgcgccggctcagcaacgcagccacgcggggcatagccggcctgccgtcgctccacaaccgcaccgtactgggggtcttctttggctaccatgttctttccgacgtggtgagcgtggaaacgcccggttgccccgccgagttcctcaacatccgcatcccacctggagaccccgtgttcgaccccgaccagcgcggggacgtggtgctgcccttccagaggagccgctgggaccccgagaccggacggagtcccagcaacccccgggacctggccaaccaggtgacgggctggctggacggcagcgccatctatggctcctcgcactcctggagcgacgcgctgcggagcttctcggggggacagctggcgtcggggcccgaccccgctttcccccgagactcgcagaaccccctgctcatgtgggcggcgcccgaccccgccaccgggcagaacgggccccgggggctgtacgccttcggggcagagagagggaaccgggaacccttcctgcaggcgctgggcctgctctggttccgctaccacaacctgtgggcgcagaggctggcccgccagcacccagactgggaggacgaggagctgttccagcacgcacgcaagagggtcatcgccacctaccagaacatcgctgtgtatgagtggctgcccagcttcctgcagaaaacactcccggagtatacaggataccgtcctttcctagaccccagcatctccccggaatttgtggtggcctctgagcagttcttctctaccatggtgccccctggtgtctacatgagaaatgccagctgtcatttccggaaggtcctgaacaagggttttcaaagctcccaagctctcagggtctgcaacaactactggattcgggagaaccccaatctgaacagtacccaggaggtgaatgagctgctgctgggaatggcctcccagatttcggagttggaggacaacatagtggttgaagatctgagggattactggcctggccctggcaaattctcccgtacagactatgtggccagcagcatccaacgtggccgagatatggggctgcccagctatagccaggccctgctggcctttgggctggacatcccaaggaactggagtgatctcaaccctaatgtggacccccaggtgctggaggccacagctgccctgtacaaccaggacctatcccagctagagctgctccttggcgggctcctggagagccatggggaccctggacccctgttcagtgccattgtcctcgaccagtttgtacggctgcgggatggtgaccgctactggtttgagaacaccaggaatgggctgttctccaagaaggagattgaagacatccgaaataccaccctgcgggacgtgctggtcgctgttatcaacattgaccccagtgccctgcagcccaatgtctttgtctggcataaaggtgcaccctgccctcaacctaagcagctcacaactgacggcctgccccagtgtgcacccctgactgtgcttgacttctttgaaggcagcagccctggttttgccatcaccatcattgctctctgctgccttcccttagtgagtctgcttctctctggagtggtggcctatttccggggccgagaacacaagaagctacaaaagaaactcaaagagagcgtgaagaaggaagcagccaaagatggagtgccagcgatggagtggccaggccccaaggagaggagcagtcccatcatcatccagctgctgtcagacaggtgtctgcaggtcctgaacaggcatctcactgtgctccgtgtggtccagctgcagcctctgcagcaggtcaacctcatcctgtccaacaaccgaggatgccgcaccctgctgctcaagatccctaaggagtatgacctggtgctgctgtttagttctgaagaggaacggggcgcctttgtgcagcagctatgggacttctgcgtgcgctgggctctgggcctccatgtggctgagatgagcgagaaggagctatttaggaaggctgtgacaaagcagcagcgggaacgcatcctggagatcttcttcagacacctttttgctcaggtgctggacatcaaccaggccgacgcagggaccctgcccctggactcctcccagaaggtgcgggaggccctgacctgcgagctgagcagggccgagtttgccgagtccctgggcctcaagccccaggacatgtttgtggagtccatgttctctctggctgacaaggatggcaatggctacctgtccttccgagagttcctggacatcctggtggtcttcatgaaaggctccccagaggataagtcccgtctaatgtttaccatgtatgacctggatgagaatggcttcctctccaaggacgaattcttcaccatgatgcgatccttcatcgagatctccaacaactgcctgtccaaggcccagctggccgaggtggtggagtctatgttccgggagtcgggattccaggacaaggaggagctgacatgggaggattttcacttcatgctgcgggaccatgacagcgagctccgcttcacgcagctctgtgtcaaaggtggaggtggaggtggaaatggtattagagatatctttaaacaaaacatcagctgtcgagtctcgttcatcactcggacacctggggagcgctcccacccccagggactggggccccctgccccagaagccccagagctgggaggccctggactgaagaagaggtttggcaaaaaggcagcagtgcccactccccggctgtacacagaggcgctgcaagagaagatgcagcgaggcttcctagcccaaaagctgcagcagtacaagcgcttcgtggagaactaccggaggcacatcgtgtgtgtggcaatcttctcggccatctgtgttggcgtgtttgcagatcgtgcttactactatggctttgccttgccaccctcggacattgcacagaccaccctcgtgggcatcatcctgtcacgaggcacggcggccagcgtctccttcatgttctcttatatcttgctcaccatgtgccgcaacctcataaccttcctgcgagagactttcctcaaccgctatgtgccttttgatgccgcagtggacttccaccgctggatcgccatggctgctgttgtcctggccattttgcacagtgctggccacgcagtcaatgtctacatcttctcagtcagcccactcagcctgctggcctgcatattccccaacgtctttgtgaatgatgggtccaagcttccccagaagttctattggtggttcttccagaccgtcccaggtatgacaggtgtgcttctgctcctggtcctggccatcatgtatgtcttcgcctcccaccacttccgccgccgcagcttccggggcttctggctgacccaccacctctacatcctgctctatgccctgctcatcatccatggcagctatgctctgatccagctgcccactttccacatctacttcctggtcccggcaatcatctatggaggtgacaagctggtgagcctgagccggaagaaggtggagatcagcgtggtgaaggcggagctgctgccctcaggagtgacctacctgcaattccagaggccccaaggctttgagtacaagtcaggacagtgggtgcggatcgcctgcctggctctggggaccaccgagtaccaccccttcacactgacctccgcgccccatgaggacacactcagcctgcacatccgggcagtggggccctggaccactcgcctcagggagatctactcatccccaaagggcaatggctgtgctggatacccaaagctgtaccttgatggaccgtttggagagggccatcaggagtggcataaatttgaggtgtcagtgttggtgggagggggcattggggtcaccccctttgcctccatcctcaaagacctggtcttcaagtcatccttgggcagccaaatgctgtgtaagaagatctacttcatctgggtgacacggacccagcgtcagtttgagtggctggctgacatcatccaagaggtggaggagaacgaccaccaggacctggtgtctgtgcacatttatgtcacccagctggctgagaagttcgacctcaggaccaccatgctatacatctgcgagcggcacttccagaaagtgctgaaccggagtctgttcacgggcctgcgctccatcacccactttggccgtccccccttcgagcccttcttcaactccctgcaggaggtccacccacaggtgcgcaagatcggggtgttcagctgcggccctccaggaatgaccaagaatgtagagaaggcctgtcagctcgtcaacaggcaggaccgagcccacttcatgcaccactatgagaacttctgagcctgtcctccctggctgctgcttccagtatcctgccttctcttctgtgcacctaagttgcccagccctgctggcaatctctccatcagaatccaccttaggcctcagctggagggctgcagagcccctcccaatattgggagaatattgacccagacaattatacaaatgagaaaaggcaggagactatgttctacaattgcagtgcatgatgattataagtccacctgtttatcaacggcaccattcctgcagccctccagacttcctgcccttagcaagtgcgcaaccagtcaggatctcccaaagaagataaagaccactcctcaccccagctcaagccatggcaggcgtggcaagcaaagtggggaggagacagtccctgcttgtgacaagtgtggaggtgaaaaggtacaatagtgcttgtctccgatagctccccacatctctaattgacttccacaaaatcgatgcgttgctttggtatttgcttggactgacatttgagggaggaggaggctgggatcctctggctgagaatctcctcagagcccagtgcagaagctgtgatgcttagaacctggacagcccgactgcctcaactctgtctccaggtctattccctccagctccaaaaggagcagccctacttctaccccttcccgtccccaaagtgtcagcaactttgaggagggcaccaggaaacaaagatgcctccccagccctgatattcttgatgtcaccagtgatacccactgccctgacccctgggcaggcccctctctgcatctactggagtggtccctgggctctggggctgaaggattccagcctctctgccagatattcagtactcgatctcaattcccctcttccacaagagttgggtgaccagctgtcctagtttgcccaggactctccctgttttagcactgaaagtctcttgccccaggaaaccccatcagtcccaggcagattgggacagctggtcaccttacgcaagagccaggctgaaacatcccctccatactcagctctttaacttttcttttcctttttcatcgggctctttcctaaaaagctgagctgtaaaatattttacatcgaggtataataaataatcatgtacatgttttaccaccacccaggtcaagacatagaatgtttcaacatttccatcaccccagaaactccccttgtacccccttccacttcgtctcccctagctcctagaagcaaccactgatgtgatttctaccaaatccagttttggtcctactaaatatactcttttgagactggcctcttttactcaccataatgcctttgtaattcatccatgctgttgtgtgtatcagcagtttgttccttttcattgctgagtagtattctattgtagagatgtaccacagtttgtttattcttctgttgatggacgtttgggttgtttctaattttgaatgattataaataaaaattctgtgagtgttcttgtaaaaaaaaaaaaaaaaaaaaaaaaaaaaaaaaaaaaaaaaaaaaaaaaaaaaaaaaaaaaaaaaaaaaaaaaaaaaaaaaaaa

SEQ ID NO: 267 - DNA, 2077 bp, Homo sapiens; identical to SEQ ID NO: 40

SEQ ID NO: 268 - DNA, 433 bp, Homo sapiens
ttttttttttttttggttgtgcattcatttattcagtcaacaaatatttagctgagcactggctagctgccaggtattgcactaaggacccaaagatggaagagatgatgtccctgccctcatggagcttgcagtcgtgttgagcagactgtcaaacagatttaggtaaggcaatgtgaccagtgctatgatacaaacaggatgctacaagagtacttggaaagggtgtatactgcaaactgagggccaagaaaggctccctggaatacgtggtacctgaattacatggtgaataacagatgcaataaagaaatgggctgagctaccagacttcccggtgttccatgtaccttaaatactttacaaagtttaacgatgataatgtgtgtggtatggggtgggtctggtcctgcccaaatctcatgctgaatgg

SEQ ID NO: 269 - DNA, 467 bp, Homo sapiens
  misc_feature (435)..(435): "n" = a, t, g, or c.
aaaaactgtttttcccattaattttcatcggcttctccgcgccggggtcgcacgtcctcatgagcttcgctgggctggagacagctagtacactctccgcagtgctgtgaaacctgattctctgcgtcgactccagagtaataggggcgccctctagtgaggccggaggaccctaccagagctagcatctttctgaaccaccccagggggacgttaggtggcagtgatgaggcaggtcacccactcccccgtcctggatgccactcagctagcccagctgagtgggggtgggaaggaatagcgttttggagttgattccctaacttcccacctggcttcttgtgaaggtggtgtttgagggccaaggtaggtgtcagcaaggcatagaaagataaatcccaagattcttggcaagtcttgcaatcttatgtagcnaattttgggaactgaagctcaaagcctcgtgc

SEQ ID NO: 270 - DNA, 455 bp, Homo sapiens
  misc_feature (21)..(21): "n" = a, t, g, or c.
  misc_feature (31)..(31): "n" = a, t, g, or c.
  misc_feature (369)..(369): "n" = a, t, g, or c.
  misc_feature (400)..(400): "n" = a, t, g, or c.
  misc_feature (428)..(428): "n" = a, t, g, or c.
  misc_feature (433)..(433): "n" = a, t, g, or c.
  misc_feature (447)..(447): "n" = a, t, g, or c.
ggtagaaaacaaagaggcatnctctgatttntatactctgtttttgcaggtgctcttttctttgaatggagatttgatgagcaagtggttaggatgcagggagagctactatgggtgatattttccttgtttaggagctgtgagttaaaattgtatcctttctggtttatctaaggaaagtcaaatcttgacagaaaacatttttccttggaaggtcaactctcagacattgtattttggtttccctcagtcctcataacttccttcttgctgaacatattttattctcttttcagagaaggaaaataaaaaggattctaaaagtttggatgcattggaaaaattttccttgaggcatttagcaacacnatagaaaatgggcctttgaatccttttccanaaacttttaggccatagggtcttttatnaggancacggggataggtnaaaattga

SEQ ID NO: 271 - DNA, 383 bp, Homo sapiens
ttttttagcatgtatacctttattctaatctcctgaaaaaatttagaaggctatgcttaagaaaatgttggtagtagatgtaataataaatcaatacactcaagtttaggcccatatagattcccaactagtgatcagttccttgcttcttagagtaactgagcaaatatatgatgaaaagcaatgtataaaattctatccaagaacaaatttgtgatgttcaaaaacaatcctttgttatattgacaatatagatttaaatatagctttatataataagtttgtcagggtaaagtcagaaaggatgtgaactgagaggactgcagaagtttctgttaaggaaaaaaatccaacttcctttagttgatatacccaaagagaag

SEQ ID NO: 272 - DNA, 2961 bp, Homo sapiens; identical to SEQ ID NO: 135

SEQ ID NO: 273 - DNA, 495 bp, Homo sapiens
aagtgaaaataaacatgtttttattgtttcatgctaaaagacatatttggcttcacacgcttacagctgggaagaatgcatatttttggcaaagaaggctcgagtaatctctgcacgttcacacggttgacccctccctgcatgaagagcagatggtgtttcatgcacagatttctggcacagtcctcctcttgtctgatgtaaaaggtgcgagtggacctctagccccctttccccttttgcttcttctgatcagtctcgcggtaaagagcaaatttagcacttcattaaggccactaacccaagtcaagctctggactctgaaagcactgagtctaccacagaatcacagaacataaaacagaattaacatgtggatagttttttgaaaaccgatggtagaaagtggtcctgaagggagggggcttagggtcatgacttctggtgtcttctagaagaaacatgtaagtccaggaaaagaggacttgaaaaaaa

SEQ ID NO: 274 - DNA, 622 bp, Homo sapiens
  misc_feature (160)..(160): "n" = a, t, g, or c.
ggcatgcaggctctttttactgttctgggcagtgttttgcaatgtgtgacccctccgcactgttggtgaacatacagacctcctatatgggcacccaagcccaggccagtgtgaaaaccttggcgggggggtggggaggatgaaaaggggaggcccctancctgactcaaaggtgaaaactgctaggccctgctgtccttggggtacaactggtaaggggctttacctccccgcccccgcgggtgggcttctggaagtggatctccaagacgtcatgcagctccgggccatccaaaatatcaggaatgttgagcaccagtaccgagcggggaactggctgcgacctgatctcagccttctggatctccccattcacatacggagagactctcagagggacttgctgcccacccagtggcactgtgaactggccgatttggcacagacgctgagccactccatccctagcaaaccccagcatgacactccctggcagtagcttccgaacgttcacatcgccaccttcgttcctagtcttgccaaagaagatctctagcttgtccagcagcttcttctcactcagcctgaagctggcaggaaatccatgaccaacaccccttcg

SEQ ID NO: 275 - DNA, 533 bp, Homo sapiens
gagacattgtctcgctctgtcacccaagcttaagttcaatggcgcaatctcaggtcactgcaacctccacctccccggttcaagtgattctcctgcctcagtctcccaagtagcttggattacaggatcctgccaccacgcccagcaaatttttgtattttcagtaaagacgaggtttcaccagcttggccaggctggtctcgaactcctgacctcaggttttctgcacgccttggcctcccaaagtggtgagattacaggcgtgagccaccgtgcccagcaaccttctaataaaaatctgtattttctcagtaggcaacaagtacagaaagacagatacatagaatcatgctccatatataccttctagacagatacatagaatcatgctccatatatgccttctagacagatacatagaatcatgctccatttatacctctgccctggtcattggctgaatcatgatgatttttttttccccaagtcttttccacactattccttgtgggaaaacacagggagactgaaga

SEQ ID NO: 276 - DNA, 513 bp, Homo sapiens
tttaaattgtgatggtcctgtctcaggaaaaggtcatttcttcccctcaaattctctggaaggcaggagatccccatccattggacatatatcctgtaggtgacctggggaatcaggagttcattgcattctgtggggaagtggaggagacacccatgagaaacacactgggccatttctccataggggcccctcagcatttagagaagctgtaggttttgtcccagccagcgttgttagtcctttgtgacacttccagggacttgagtttgaatcaaagtcatttgtgtccagcacagagggtctgagccaaggccacgtctgcatcgtgacttcttattaagccagatgtgtacatgaaaagcaggacactcgctaaacacagtcggtgtcctcagctgctgcaagcaagacagtcaccatctacacaagtgtgaccctttcaatttagacatttatttttccactaacggccctgtggggttcacgcagtcaattctcctgccatttctc

SEQ ID NO: 277 - DNA, 467 bp, Homo sapiens
cacattttaatctttttatttatataaaaaattataaattatttcacacgaaagcttttggagtaagttaactatgaggccaaagttcttttctcagagaatctgcacccagggaggcttttctgcctacttcccacggtggccgtgtgccccttctacctccttcagaggaggaccaaggaccatcacatcagccagcagggggaggccgtgatcgatcaccactgctggcaacagacctctcagggcacacccactgtgtatacaactagtcatcagtcatctccgtagtggggttgggagcaaagtgaataggactctattacaatgcaggcaagttggtagtgacaatgaccattatctaagaagtacaaccttaccaaaaaaaggtaactttttttttttttttgagactcagtctggctctatcgcccaggctggagtgcagtggtacgatctcagctcac

SEQ ID NO: 278 - DNA, 1508 bp, Homo sapiens
cgctaagcgtcccagccgcatccctcccgcagcgacggcggcccgggacccgcgggctgtgaaccatgaacacccgcaatagagtggtgaactccgggctcggcgcctcccctgcctcccgcccgacccgggatccccaggacccttctgggcggcaaggggagctgagccccgtggaagaccagagagagggtttggaggcagcccctaagggcccttcgcgggagagcgtcgtgcacgcgggccagaggcgcacaagtgcatacaccttgatagcaccaaatataaaccggagaaatgagatacaaagaattgcggagcaggagctggccaacctggagaagtggaaggagcagaacagagctaaaccggttcacctggtgcccagacggctaggtggaagccagtcagaaactgaagtcagacagaaacaacaactccagctgatgcaatctaaatacaagcaaaagctaaaaagagaagaatctgtaagaatcaagaaggaagctgaagaagctgaactccaaaaaatgaaggcaattcagagagagaagagcaataaactggaggagaaaaaaagacttcaagaaaaccttagaagagaagcatttagagagcatcagcaatacaaaaccgctgagttcttgagcaaactgaacacagaatcgccagacagaagtgcctgtcaaagtgctgtttgtggcccacaatcctcaacatgggccagaagctgggcttacagagattctctaaaggcagaagaaaacagaaaattgcaaaagatgaaggatgaacaacatcaaaagagtgaattactggaactgaaacggcagcagcaagagcaagaaagagccaaaatccaccagactgaacacaggagggtaaataatgcttttctggaccgactccaaggcaaaagtcaaccaggtggcctcgagcaatctggaggctgttggaatatgaatagcggtaacagctggggtatatgagaaaatattgactcctatctggccttcatcaactgacctcgaaaagcctcatgagatgctttttcttaatgtgattttgttcagcctcactgtttttaccttaatttcaactgcccacacacttgaccgtgcagtcaggagtgactggcttctccttgtcctcatttatgcatgtttggaggagctgattcctgaactcatatttaaactctactgccagggaaatgctacattatttttctaattggaagtataattagagtgatgttggtagggtagaaaaagagggagtcacttgatgctttcaggttaatcagagctatgggtgctacaggcttgtctttctaagtgacatattcttatctaattctcagatcaggttttgaaagctttgggggtctttttagattttaatccctactttctttatggtacaaatatgtacaaaagaaaaaggtcttatattcttttacacaaatttataaataaattttgaactccttctgtaaaaaaaaaaaa

SEQ ID NO: 279 - DNA, 467 bp, Homo sapiens
cctgagaagggcctgatttgcagcatcatgatgggcctctccttggcctctgctgtgctcctggcctccctcctgagtctccaccttggaactgccacacgtgggagtgacatatccaagacctgctgcttccaatacagccacaagccccttccctggacctgggtgcgaagctatgaattcaccagtaacagctgctcccagcgggctgtgatattcactaccaaaagaggcaagaaagtctgtacccatccaaggaaaaaatgggtgcaaaaatacatttctttactgaaaactccgaaacaattgtgactcagctgaattgtcatccgaggacgcttggaccccgctcttggctctgcagccctctggggagcctgcggaatcttttctgaaggctacatggacccgctggggaggagagggtgtttcctcccagagttactttaataaaggttgttcatagt

SEQ ID NO: 280 - DNA, 1155 bp, Homo sapiens
atggattgcagtaacggatcggcagagtgtaccggagaaggaggatcaaaagaggtggtggggacttttaaggctaaagacctaatagtcacaccagctaccattttaaaggaaaaaccagaccccaataatctggtttttggaactgtgttcacggatcatatgctgacggtggagtggtcctcagagtttggatgggagaaacctcatatcaagcctcttcagaacctgtcattgcaccctggctcatcagctttgcactatgcagtggaattatttgaaggattgaaggcatttcgaggagtagataataaaattcgactgtttcagccaaacctcaacatggatagaatgtatcgctctgctgtgagggcaactctgccggtatttgacaaagaagagctcttagagtgtattcaacagcttgtgaaattggatcaagaatgggtcccatattcaacatctgctagtctgtatattcgtcctgcattcattggaactgagccttctcttggagtcaagaagcctaccaaagccctgctctttgtactcttgagcccagtgggaccttatttttcaagtggaacctttaatccagtgtccctgtgggccaatcccaagtatgtaagagcctggaaaggtggaactggggactgcaagatgggagggaattacggctcatctctttttgcccaatgtgaagacgtagataatgggtgtcagcaggtcctgtggctctatggcagagaccatcagatcactgaagtgggaactatgaatctttttctttactggataaatgaagatggagaagaagaactggcaactcctccactagatggcatcattcttccaggagtgacaaggcggtgcattctggacctggcacatcagtggggtgaatttaaggtgtcagagagatacctcaccatggatgacttgacaacagccctggaggggaacagagtgagagagatgtttagctctggtacagcctgtgttgtttgcccagtttctgatatactgtacaaaggcgagacaatacacattccaactatggagaatggtcctaagctggcaagccgcatcttgagcaaattaactgatatccagtatggaagagaagagagcgactggacaattgtgctatcctga

SEQ ID NO: 281 - DNA, 3065 bp, Homo sapiens; identical to SEQ ID NO: 160

SEQ ID NO: 282 - DNA, 2128 bp, Homo sapiens
cttgagaatgtttctgcatgatttctctgggcttgctgtcttacctgagagcaggaagtcaaaaggagagtgatggagccacctgctgccctctactttgcagatattaaagaggagcctgaaactgttccttggacatcttatgaatgtcagaaaataccttttggagggttagaagatcaggggacatggttgttcacatttgctgccacggaacaccgccagtcttcacttggaaacagaatcacgccttgtgaagagatcatccctaagcaggagagaagctactaaaggattgtgtcctcctccaccttccctgtgctcggtctccacctgtctcccattctgtgacgatggttcaatggaagagactctgccagctgcattacttgtgggctctgggctgctatatgctgctggccactgtggctctgaaactttctttcaggttgaagtgtgactctgaccacttgggtctggagtccagggaatctcaaagccagtactgtaggaatatcttgtataatttcctgaaacttccagcaaagaggtctatcaactgttcaggggtcacccgaggggaccaagaggcagtgcttcaggctattctgaataacctggaggtcaagaagaagcgagagcctttcacagacacccactacctctccctcaccagagactgtgagcacttcaaggctgaaaggaagttcatacagttcccactgagcaaagaagaggtggagttccctattgcatactctatggtgattcatgagaagattgaaaactttgaaaggctactgcgagctgtgtatgcccctcagaacatatactgtgtccatgtggatgagaagtccccagaaactttcaaagaggcggtcaaagcaattatttcttgcttcccaaatgtcttcatagccagtaagctggttcgggtggtttatgcctcctggtccagggtgcaagctgacctcaactgcatggaagacttgctccagagctcagtgccgtggaaatacttcctgaatacatgtgggacggactttcctataaagagcaatgcagagatggtccaggctctcaagatgttgaatgggaggaatagcatggagtcagaggtacctcctaagcacaaagaaacccgctggaaatatcactttgaggtagtgagagacacattacacctaaccaacaagaagaaggatcctcccccttataatttaactatgtttacagggaatgcgtacattgtggcttcccgagatttcgtccaacatgttttgaagaaccctaaatcccaacaactgattgaatgggtaaaagacacttatagcccagatgaacacctctgggccacccttcagcgtgcacggtggatgcctggctctgttcccaaccaccccaagtacgacatctcagacatgacttctattgccaggctggtcaagtggcagggtcatgagggagacatcgataagggtgctccttatgctccctgctctggaatccaccagcgggctatctgcgtttatggggctggggacttgaattggatgcttcaaaaccatcacctgttggccaacaagtttgacccaaaggtagatgataatgctcttcagtgcttagaagaatacctacgttataaggccatctatgggactgaactttgagacacactatgagagcgttgctacctgtggggcaagagcatgtacaaacatgctcagaacttgctgggacagtgtgggtgggagaccagggctttgcaattcgtggcatcctttaggataagagggctgctattagattgtgggtaagtagatcttttgccttgcaaattgctgcctgggtgaatgctgcttgttctctcacccctaaccctagtagttcctccactaactttctcactaagtgagaatgagaactgctgtgatagggagagtgaaggagggatatgtggtagagcacttgatttcagttgaatgcctgctggtagcttttccattctgtggagctgccgttcctaataattccaggtttggtaacgtggaggagaactttgatggaaagagaacttccttctgtactgttaacttaaaaataaatactcctgatcaaaaaaaaaaaa

SEQ ID NO: 283 - DNA, 3068 bp, Homo sapiens; identical to SEQ ID NO: 54

SEQ ID NO: 284 - DNA, 2905 bp, Homo sapiens
cggcagccagctgagagcaatgggaaatggggagtcccagctgtcctcggtgcctgctcagaagctgggttggtttatccaggaatacctgaagccctacgaagaatgtcagacactgatcgacgagatggtgaacaccatctgtgacgtctgcaggaaccccgaacagttccccctggtgcagggagtggccataggtggctcctatggacggaaaacagtcttaagaggcaactccgatggtacccttgtccttttcttcagtgacttaaaacaattccaggatcagaagagaagccaacgtgacatcctcgataaaactggggataagctgaagttctgtctgttcacgaagtggttgaaaaacaatttcgagatccagaagtcccttgatgggtccaccatccaggtgttcacaaaaaatcagagaatctctttcgaggtgctggccgccttcaacgctctgagcttaaatgataatcccagcccctggatctatcgagagctcaaaagatccttggataagacaaatgccagtcctggtgagtttgcagtctgcttcactgaactccagcagaagttttttgacaaccgtcctggaaaactaaaggatttgatcctcttgataaagcactggcatcaacagtgccagaaaaaaatcaaggatttaccctcgctgtctccgtatgccctggagctgcttacggtgtatgcctgggaacaggggtgcagaaaagacaactttgacattgctgaaggcgtcagaacggttctggagctgatcaaatgccaggagaagctgtgtatctattggatggtcaactacaactttgaagatgagaccatcaggaacatcctgctgcaccagctccaatcagcgaggccagtaatcttggatccagttgacccaaccaataatgtgagtggagataaaatatgctggcaatggctgaaaaaagaagctcaaacctggttgacttctcccaacctggataatgagttacctgcaccatcttggaatgtcctgcctgcaccactcttcacgaccccaggccaccttctggataagttcatcaaggagtttctccagcccaacaaatgcttcctagagcagattgacagtgctgttaacatcatccgtacattccttaaagaaaactgcttccgacaatcaacagccaagatccagattgtccggggaggatcaaccgccaaaggcacagctctgaagactggctctgatgccgatctcgtcgtgttccataactcacttaaaagctacacctcccaaaaaaacgagcggcacaaaatcgtcaaggaaatccatgaacagctgaaagccttttggagggagaaggaggaggagcttgaagtcagctttgagcctcccaagtggaaggctcccagggtgctgagcttctctctgaaatccaaagtcctcaacgaaagtgtcagctttgatgtgcttcctgcctttaatgcactgggtcagctgagttctggctccacacccagccccgaggtttatgcagggctcattgatctgtataaatcctcggacctcccgggaggagagttttctacctgtttcacagtcctgcagcgaaacttcattcgctcccggcccaccaaactaaaggatttaattcgcctggtgaagcactggtacaaagagtgtgaaaggaaactgaagccaaaggggtctttgcccccaaagtatgccttggagctgctcaccatctatgcctgggagcaggggagtggagtgccggattttgacactgcagaaggtttccggacagtcctggagctggtcacacaatatcagcagctcggcatcttctggaaggtcaattacaactttgaagatgagaccgtgaggaagtttctactgagccagttgcagaaaaccaggcctgtgatcttggacccaggcgaacccacaggtgacgtgggtggaggggaccgttggtgttggcatcttctggacaaagaagcaaaggttaggttatcctctccctgcttcaaggatgggactggaaacccaataccaccttggaaagtgccgacaatgcagacaccaggaagttgtggagctaggatccatcctattgtcaatgagatgttctcatccagaagccatagaatcctgaataataattctaaaagaaacttctggagatcatctggcaatcgcttttaaagactcggctcaccgtgagaaagagtcactcacatccattcttcccttgatggtccctattcctccttcccttgccttcttggacttcttgaaatcaatcaagactgcaaaccctttcataaagctgccttgctgaactcctctctgcaggagccctgcttaaaatagttgatgtcatcactttatgtgcatcttatttctgtcaacttgtatttttttttcttgtatttttccaattagctcctcctttttccttccagtctaaaaaaggaatcctctgtgtcttcaaagcaaagctctttactttccccttggttctcataactctgtgatcttgctctcggtgcttccaactcatccacgtcctgtctgtttcctctgtatacaaaaccctttctgcccctgctgacacagacatcctctatgccagcagccaggccaaccctttcattagaacttcaagctctccaaaggctcagattataactgttgtcatatttatatgaggctgttgtcttttccttctgagcctgcctttatccccccacccaggagtatcctcttgccaaagcaaaagactttttccttggctttagccttaaagatacttgaaggtctaggtgctttaacctcacataccctcacttaaacttttatcactgttgcatataccagttgtgatacaataaagaatgtatctgg

SEQ ID NO: 285 - DNA, 3032 bp, Homo sapiens
agtcgctgtttgggacgctgggtgtgcggtgttctgtctccgctcccgtttcgctgtcacagcccgttccttcccggagcccgggacaggctgggcgcgcgcccgtgtgagtgagcgggactcagggcagaagtgtcccctcactgcgtttttttttccttttatccaaagaacggggcagttagtacgcttgccttcctgtcgcccggttgggagcggggttggtgtgcggagtggttcgcctttttttctttagaacttgtgagcctttttttttttttttttttctttcctttttttaggctcagtgctgtccgggctggtttgcccggtccctgactaacggctttctgccccttctctcgccacccctgcccaaggtcgcccctctgccttcgcccctgtcccgggagggtgggaagctttgaccccgccctgcccactcgcgtctccgcagccgtagccgcgcctgtcccaatatgaatagggtcaacgacccacttatttttataagagatattaagcccggactgaaaaacttaaatgtcgtctttattgtcctggagataggacgcgtgaccaaaaccaaagacggccatgaagtgagatcgtgcaaagtagcagataaaacgggcagcatcactatttccgtgtgggatgagatcggaggtcttatacagccaggggatattattcggttgaccagagggtatgcatccatgtggaaaggatgtctgacactttatactggaaggggtggtgaacttcaaaaaattggggatctaggtgcggtgcaggcagccgcaatgcgagattccatacactactaccctggtaatgatctccaccctgacctggaggagccatcctctctaggggtgtaagattttgtatggtttattcagaagtgccaaatttcagtgaacccaacccagattatcgaggacagcagaacaaaggggcacagagtgaacagaagaataattccatgaatagtaatatgggtacaggtacatttggaccagtgggaaatggtgttcacactggccctgaatcaagggaacaccagttttcacatgctggcagaagcaatggccggggacttataaatccacaactacaaggaacagctagtaatcaaacagtgatgaccacaataagtaatggcagggaccctcggagagcctttaaaagatgacctatgctaaatactcatgtgtagtttttatactacatgccctacttgaacacttattgcacttttatttattgttaactgtgaaaagtacgtcctttattgggtttccttttatattcttggtttgttaagaagaatggtttgtttttatagcaaaactgttaagctgctcgagtctcctgttgaagaatgggaacactgaaaagtaggggcatttatttttagagtaaaaagattattggatagcctttaaaaaacctgcacccatttcatgggtgagttacttaagacatcagctttatagcctctatgagtctatcttctgtataagttttgtaatatttaacataaggcttaatgggagatgttcttttgtcttgtattcagatattgccaactaaagcaataaccatcaaaaaacacaagaacttgtcaatgctagcagtaatttttgagtgtttgtggctctcggaatgattgacttcgttcagtgactactattaagattttccaaggactgactcatcccaaatttttgttgtattaccaaaaaaacagattccttatcagaatttggaatagaatgtgatctctattgcaacaagtaattttaaaagaaagctacatttattttagagtagtgctcctaacatgtattatcaactttgtggattacattggaggaaaatttaaaactggggccttgaatatttattttttgaaactaccatgttaaatactgaagtataatttgggggagttataaagttatgataaacattcatctgattattttaaacaatagttgtggtagataaacatactggaggtgagtaaaattgaattcatatagtaacatgcagtctgaagtcctagttacttaataggtactcagcctggagtgaaaatcctgggtactgactttgagaggagtgagtgtgcatgttgtcaaagtttctgaacacagttcacatagccttattagcaaaagttttaagaaatggctctatcaaagaagcaattgcagctttattcagaaatataaaagtggaatttatgtacatgtcataagtggtacccacttcccctttttactgtagggtggataactcttaggatttaactctttgaatattatctcttgaataaagcatgtgttaatgttaacaaacctacgtaatttttgccctttcaatgacttacagtggagagccagtacatcttaactactgttgtagtgatggtatcaacctcatggttacttagctctgcatttgttgctttgttttttttccacttcaaatcacaaaataagtagattttgttttctgaaaactccatagcatttgaatacaaaaagttgtgccagattgtttgccctaattcactgtgtttaacaaatatttcagtacacactatgtattaggcactgtgtggaaagtgttaaggggtagacaagataccgaataatctccacaagtttatttgtggtctatagtacttttgtaactggggttacaaaaattatagaaatttttttcctttgttcatatgcatattcatgattataatttggctttgtttgtgattaatgttttcttaagattttcacattatagaatacctcaaaagaagttgtctaaggactgggatagagagtatgtttcataaaattgtagatgtttagaatttttaaaaaccctacaaattagtatatgattgttttatataagtaagataggagcaacactttaaattatttgtgggagaatacagcattaaaggtgattttaaaagaaaaaaaaaaaaaaaaaaaaaaaaaaaaaaaaaaaaa

SEQ ID NO: 286 - DNA, 570 bp, Homo sapiens
ttttgatatacccaaagataagtgtattcaaaatgcaattcattttttttcagaacagagttgacttctttgtggaaactattttcggataaaaagagagcctatatacccgggggaaaaaaacctctcaacattttttagttacatgaagaattacatgaggcacctagcatgttcagtttgtcagtaactcaattagtcttttgacaactggcttgcgtccccccatcccccttgccccatatggctctgttttgaaaagaattagagtcatgcatcatttaataacacaaatacattctgagaaatgtgtcattaggcaatttcatcattgtgtgaatatcagagtgtacttacacaaacctagatggtgtaggtagcctactacacacctaggctatatggaatccctgttgctcctaggttacaaacttgtgcatgttactgtattgaacactgtaggctattgtaacatcatggtgagtatttgtgtgtctaaacatagaaaagcacactaaagataccatattattaatataatcttttgggaccaatgtcaaatatgtggtt

SEQ ID NO: 287 - DNA, 538 bp, Homo sapiens
ctagcaatatttgaagtgctggcactagagatgttgtctggtgagcaagcagagatgctggtctccatgctatcagagctatcgaggctcagagtatcaaaggcctggtccttgtagctgtgatctggataatggaaactattcaagtagacatttgattcagatgctgtgcggttataaaattcagatttctgcctgtgtccttcactcatctgttggggattataacctaaggaaggagccataaatatgttagtttgcctcatttttcagtctttgaatcttaaacatctacagacacaagccagcaaccagaaacatctgcctatgaagcttgggccttggtctaatttgttttgaagccaagaagatcaaagaaagagcaccgtgctcagtgcaagcaacagtttgaatgaagtggtctgctgagtctcttacccctcagcaggatcacttgacactttcctatggcattcctacatctcagcacaaccagcaacacacaaacacaaaagaaaccaaacagaaacacaatcaa

SEQ ID NO: 288 - DNA, 487 bp, Homo sapiens
  misc_feature (377)..(377): "n" = a, t, g, or c.
  misc_feature (386)..(386): "n" = a, t, g, or c.
  misc_feature (391)..(391): "n" = a, t, g, or c.
  misc_feature (407)..(407): "n" = a, t, g, or c.
  misc_feature (440)..(440): "n" = a, t, g, or c.
  misc_feature (470)..(470): "n" = a, t, g, or c.
ttgtcttacattttttcttacaacaatcttttgagaaaagaatagagaatgtttaccaggtagaaaaaacctgattccttaacaagacttctcagtcacttgtttctctttccctttcacttttcctttgtgcttttgaaaacaaaggctaaagcaggtgttataaatttattcattcctgtgctagagagcatggaacacatctctgaagtcaactcttcttttggtgtatcacgagttgaatccttaataaatgactgccacaaagaaaatttctaacagcaaatctttttaggaactgctcaggttttgccttcgtcttgacacttcattttaaaatcttggtttctactgatgtggttttcaaaaaagctggncaaaactcnggtcntggaaatgtaggcacntggaaaaaagttgaaagggaagagaacatgcantataaggttaatccttaatcattttaaggngccaccagttccggtta

SEQ ID NO: 289 - DNA, 546 bp, Homo sapiens
aaattttctctcctcgtggtgactgtcatgtgattgtctcagtttctggaccaaacaaacacactaataattttaaatctgaaacagtgattgtgcctttcggctcatgtatgtacagggtgatcagaagtggtacctgttagcaaaagtgtcacgatgctgcacctctaccgaaactgatacccacgaactacggaatctaaacagactacaccctggtacctgcgtattactgtccacaatggaatctccaaagacaaaagagtatgaaatttatctgtagtgattatagccaccattttgaattaaattttacactctgcgctcaaataaattagctcaggccagacttagttgggacctgagagttaagtgctggatggtattatttcactttgatttttgataggaatttcttttattccctcatgtttttttttctttaaaaggtatttccagtgctcactcctcctcttttatcccccctccccaggcgctacacacaaatcacccccaaagtcgtgttttaaatgcacctgtatttgc

SEQ ID NO: 290 - DNA, 433 bp, Homo sapiens
tttttttttttttttttttaactgtcttatagatttattaatgaaaaatactttacaaaaacagtatgtttggcctaaaatagttcagctgactctgagggtttacattgacgactgagcaagtggcaataatggctgtgttattgaggacagaaggctgtgttagtgtgcctgactccatctgttcaaaagggtgaatgttatgttggcagctccgcattctaggcctaaggtttggagggcacagggaatgctgacaggccataatacctgggcaggggggctgccctgatgatgtcatcagaaccatgaccacagggctacatgtccccccaaggatgggagacagggaagacaaagggtcaggtaatagggataggtggataaaacaaagagtagaagttgggagtatagtagggaacagaggatgagg

SEQ ID NO: 291 - DNA, 3211 bp, Homo sapiens
atcggaaaagcaccttgagttactggcttcccctttacctattccatcaaccttccttccacacagtagtactcccgctttgcatcttacagttcagaggctaaagttgccaccaccacagggatcttctgagagctgcacagttaacatcccacaacaaccacccggaagcctgagcatcgcatcaccaaacactgcctttattcctatccataacccaggtagtttcccaggctctcctgttgctaccacggaccccatcacaaaatctgcatcccaagtggtaggactcaatcaaatggtgcctcaaattgagggaaacacagggacagtccctcagcctaccaatgtgaaggtagttcttccagcagctggcctctcagctgctcagccaccagcttcctaccccttaccaggctctccccttgctgccggcgtgttacccagccagaactccagtgtgctcagcacagcagcaacttctccccagccagcgagcgcaggtatcagccaggcccaggcaactgttcctcctgcagttcctacccacaccccaggccctgccccgagcccaagccctgccttgacacacagtaccgcgcagagtgacagcacctcttacatcagtgctgtggggaacacgaacgctaatgggacagtagtgccaccgcagcagatgggctcaggtccttgtggttcttgtgggcgaaggtgcagctgtgggaccaatggaaaccttcagctaaatagttactattatcctaatccaatgcctggaccaatgtaccgagtcccttcattctttactctgccatccatttgcaatggcagctacctcaaccaagcacatcagagcaatggaaaccaacttcctttttttctgcctcagactccatatgcaaatggactggtacatgacccagtcatggggagccaagccaactatggcatgcagcagatggcaggatttgggagattctatcctgtatatccagcacctaacgtagttgccaacaccagtggttcggggcccaagaagaatgggaatgtctcatgttacaattgtggtgtaagcggacactacgcacaggactgtaagcagtcgtccatggaggccaatcaacaaggcacttacagactgagatacgcacctcccctccccccttctaatgatacgttggattctgcagactgaaacgagtaaagcttgcctacttaatacactcaagtgtggggagtcatggggtgtggaggggaggaaaggaaaggtattttgtttctttgtctatacatttcctagatttctatgcagttgggatttttcatttctcttgtaccaatgtccaaaacaagaaagaatgcaatgcttttgagcctctggtctcctggttcaacaacaggcttatatgtatgatacatgtaatttaaaccttcagacaaacttaaatgttggtgcgtgcttttttttttttttacactgaatacttgctgtgtgcaatgtttactgaatctttaaaactgtgtatttgaccttttttttacaacactggtgacagtcatatggttttgaaaaaaaaaagaaattttgcttcttcccagcttttctcactttcaccctaaacgacacttcctccccagccagcctcactctgtctccggcccgcagcaggagcagccagcagtgcattcaccccacttttgtaaactgctctgcatataaaccaagggcagaatgtttcaccctgatcttatgggaggaatcgaactcccaaaatagtgtgtatatatgtaataaacagcgtcacgtaaatacatatatgcagtgcttgttgtccaaatagaaatgaaaataagtggaagagagaggaagaagtcaaccatatgaaactgaaaaaatatgacgtacgaaatggacaaaaagctttttctgaaaccaactttttacttccatcatccttttttagcctgttgcttcagagagacacaaagtgaacacactggtgtgaatgtcgctctctgtgtgcttgtgtttgtaatgaaagtctacagccaattttacttgtctaccaccgtgttgtgctcaaagagacactacttgagtgaagatttcttctttccctgtaccagctgttacagtgttacgttgtgtttaaaatgtgtatggtttattgcaatctgaacagagctatgggtttctaccataagtcaggttgtttgttccctaacctgtctctcgtagcaaagtcacttttataacagtttaccactatgcttgattataatgtgaaaggcggaattctgagtgtgttaagatggtattaatcatgtcggtgtcatgtcactaagtttaatgctgctgtttttaaaaaaaaaaaaagtttttttaaaaagccaatctatgtactaaattgcttccaggtaatttttgatttcctaaagtgcactgaggttatctggaagattgggtgtattttttggtgactgctgcattcatcagcaatgaacagtttccactgtatagtcctaggggtcagggggtgggggtttcattttccattcctcagcacagagcagaaatgatagatttttattgtttggagtaacgttggtatgcagcagaggaacataaacatttggtcttggttcagaagcctaacagattgctagacaagagaaaaaacttgaagaaaaaagaagcttaatttcatgcttcataagtagcatttatatttatagcaccaatgtacattttgaaactttctttcaggggtgggagttatggggaaggggtgggtgtgaaggggtagatgaaagctttaatttagaaagaaagttcaagtaaaggaaattattttgattaaatatattttatttgatctgggtatttttggaccacattattaaattaattgttaagctgcagttgagttgttcaagtgagagttttgataagccacttatgggccgcgttgtgaatcacttgccagttgtactttatggagcttattttatgatttaaaatactgtactgtacataggaggtatgttaccttctccttatttgtatgtttaccatatactttgatatttgaaatgttatgtactggaaaggccacttatatttctagaacagattggattttatgcaaccttttttccttgaattaacagcaataaaaaaatgaaaaacaaaaaaaaaaaaaaaaaaaaa

SEQ ID NO: 292 - DNA, 4281 bp, Homo sapiens
tttattgaccacagccactttagaaaagcttcctgtaccccaggtcagtgcaactacagcacctgctggatcagctccaccctcgagcactttgccagcagcttctagccttaaaaccccaggaacttctttaaacatgaatggacccactttaagaccaacctctagtatccctgctaataatcctttagtgactcagctgcttcaaggcaaagatgttcccatggagcaaattctgcctaaacctctcaccaaagttgaaatgaaaacggttccactgactgcaaaagaggaaagggggatgggagcgctcatagctaccaacacaacagaaaatagcaccagagaggaagttaatgagagacagtcccatccagctacgcagcagcagctgggcaaaaccttgcaaagtaagcagctcccccaggttccaaggccccttcagctcttttcagctaaggagctgagggactccagcattgacacacaccaataccacgaaggactaagtaaagcaacccaagatcagatccttcagactctcattcagagggttcggaggcagaatcttctctcagttgtgccgccctcacagttcaacttcgctcactcaggtttccagctggaagacatctccacaagccagaggttcatgctgggttttgctggcagaaggacatccaaacctgcaatggcagggcactacttactgaatatttctacctacggccggggctcagagagctttaggaggacccattctgtaaaccctgaagatcgtttttgtctaagcagccccactgaagccttgaaaatgggatatacagactgtaaaaatgcaacaggagagagtagcagcagcaaagaagatgacactgatgaggaaagtactggtgatgagcaggaatctgtcacagtgaaagaggagccccaggtttcccagagtgctggcaagggtgacacaagttcaggacctcacagcagggaaactctatctaccagtgattgcttagctagcaagaatgtgaaggctgagataccattgaatgagcaaaccactttaagtaaggagaattacctgttcactagaggccaaacatttgatgaaaagaccctagccagagatttaattcaggcagcacagaagcagatggctcatgcagtgagaggtaaggcaatccgtagcagccccgagcttttcagttctactgttcttcctctgcctgcagacagccccacccaccagcccctactccttccacccctgcaaaccccgaagttgtatggaagccccacccagatagggccaagctatagaggcatgatcaatgtccccacctcatctgacatggaccataactctgctgtaccaggtagccaggtatctagcaatgtaggtgatgtcatgtcattttcagtgactgtcactaccatccctgctagccaagctatgaatcccagcagccatggccagaccattcctgttcaggcgttctccgaagagaacagcatagagggcacgccttcgaaatgttactgccgcttgaaagccatgatcatgtgcaaaggctgtggcgctttctgccatgatgattgcatcggcccctccaaactgtgcgtctcctgccttgtcgttcggtaatgagactagaaagagatacactgtaaaggagggggaagggaagggttgaccagttgggtttttttgcgtccttttggaatcacagaaataaacaagtaggtttcagttgtcttcagagacaaatgttacttaatcaggaatacaaagtacagattttttacattttagaggaagagcaccttgtatagtaagtctaagtcaagcaagactttgtgaatttgtgacaagtttgcacttacaaaatcatgtaaatatgtcacattttgtttaacattatttttccaagtgtttaggtaataatgtattactttgaattcagattaatgttctactacttgtgactgagaaaagtttaatgccggcatggtaaaaggaagctgtctcccttctgacatttcctaggaagctaggaaaaggaaagtgaaggaatggtctaaagaaatgaccattcacactgattttgtctggacagtctggccgcaggttattcatagattattcagtctttgcaggacttggattcagggttttactcagtccctttaccttaggtggaatcttcttaaattgaaatttttggtaaggaattcatttcacaggtagtgtttcagactctgaaagccctgacttggttcttggcttctactgtactagttactagttactggtactgttgccaagcaatctgcttggaatttgtggatccctgctgttccctaatcccaccccctgccctgagacagtgaatgtagtccgtgaagggagtgcctctctgggaccccctgtgttgttacaggctgtgcagtgcaacaattccagcaaaaataccctatccccgcacttagtcattcgtggtaactaacaattttgaaatactcatataaaatgaacaggaaagtgttagtgattgggtgatttgagctacatcttgttgagcaaggggagtgaaaccacagaaactgttaaattgaacgtaaataactttggaaaacagttttgacactagaacaaggtcgcttctcttttcctcttctctcccaacctgttaacctagtgctagatagtcagctgctgttgcaggtagaaaagctcaccaatgccacatttgttcattctgttcaacctgttttgacctcccaggcatctgaacaggatgacatcatcttattatatcttactttacacatacgtgtatgtacacacacacacacaatacaagacatttttcctgttttagaaaatatagcccttgtttggattactgctgtctgagcactagaaatttctaatggaaagaggcctctgaatggctaagggaacatctggaaaggaaggaaaatgagccctaaaggttttttggttgcttgtttttgtttctttttctttcttgtttccttttttgtttttaaatccttctctagtgactgaagaaattgtgagtacataatatttaggtcatggttaaggaacattaaaataaacctgcagtttaacagaattttgtattaaatgggggagtgtcaatttgcatcatttgcatattgatttcaagtctcctaatttggaatgggtaaagtacaaatgttaatgcaacatagtacagttgaatttgtccttcatattcaggatgtgatatttacaaaatgcagaacagtttaaacttgttaagtcacattccagattaggagaaaatgggcaataatcatctctgttttgcccccattctactacccaccactgcccaccccacccccacatcacacactcttcgatgctttcccacagcccctgctccgctcctctccgtaagaaactcacttcactgtttttcacttttcacttctggcttttttgtggcccaaggccaatataggattaatatctgtgttccagcttcagccagaacgatatgtctgtccatctttctcctttcttccagcacacacagctaagagataagaaggctgcaaggattggggataaggagtatattttcaagccaagaaccagtagaaaacagaaataatggtgctcccaaatattcagtaccttgggcaatccaggaagggtttaaagagacctgttgctgcatagaactctccctgccctaccccttaactccaccttagtgccagggccgagggctggtctgcatgctggaagaggttgagagttttggaattgattccatgctaaatgtcagttaccagtttggattgatgaaagtgatttttctgctttacctttttcctgtcagaaaggttttcctctgtgctacccttaacttagggatgaacagactataactaggaaaggaggaaaggtatcagggatttttaagtccgtttagagagcaaaccatattgtgcctcttcatcttgacccaggctcttatagataggtcctaaacattgctgttcactagattatcttaacaaataatactcagccaaatatttgcatttaggaatactcctaaaacagatattgccaactagatacactgcctcaatcttgaccagacaagagaacagttgagttctctcagttgggtagtaacttgaataccagtctatttatcagttggtttcaacacagaggtttcaagtggaaagccattcatcttaaaagctgaacag

SEQ ID NO: 293 - DNA, 484 bp, Homo sapiens
aaaggtatatattttaaacgtgtgtcgtctacctaagtaagataatagtctttgaactaggtactatgtttgctgtttgggtgatgggttcactagaagcctaaaccccagcattactcaatatatccatctatcaaacctacgtgtgtacccccctagatctataataaaagtaaattaaaataaattaaataccagtcaactatttggttgactttggttgtactgattaactggaaatgtgcctctgaagccacacagccagagcaactggctttttgtcatttctaatgaaaagccttgaaagatggttctattagataacgggccacactgaagctaactgtgcatctagatcacatcaaagcagtagaggtgagatgttagcacagctttggtttctgcagttctcacctcatgcttgtaagatgtttagctgtgtcaactttttgaattaatgtgggttcttagccttcatagaccc

SEQ ID NO: 294 - DNA, 597 bp, Homo sapiens
  misc_feature (585)..(585): "n" = a, t, g, or c.
caacttcagcattcaattttattatagtcccatctccctcaacaaacaagatcagcagccagtgtgggatggtgctcaatggggctccacttcccactagagtgtaagctgcttccacgcatgctactgcgtgctccgagccatcgcagcggagtctcttctcacccagctttgatggtggggcgactcccgtgtctgcagctgtggtccaaagggtgtctgtgctggattccgaagttggcggggacattgggcacataccatctgcagcatctctttcttcttgcagccctcttttgagcaacggtatgtaaaaatcttctctttcttcttcccagggtgagagtcacagtctctgtcaatgtgatcaccaaccaccacgtctggtatctggcccttttttactgggatgggggtattacagagtgggcatactgggacgtgaacatccttctggaatgcaaacggacacttatgtgcagcgtatggaaaatgatctttacagaaatcttgtttacatgcatcacattttactggaagaaaatctagctgctttgcagtcttttctgaaacatgcttccccanatcaggaaactc

SEQ ID NO: 295 - DNA, 2798 bp, Homo sapiens
agcagactgggctgcgggcggcggggccggcgcctgcctggagggatggggctgccgggcgcgtaggggccatgccgcccgggacccgggcctgccgcgttccgcgccccggccgccgcgccccacgtccgcgccgggatggtgaacctggcggccatggtgtggcgccggcttctgcggaagaggtgggtgctcgccctggtcttcgggctgtcgctcgtctacttcctcagcagcaccttcaagcaggaggagagggcagtgagagataggaatctcctccaggttcatgaccataatcagcccatcccgtggaaagtgcagtttaacttgggcaatagcagtcgtccgagcaatcagtgccgcaactccattcaagggaagcacctcatcacggatgaactcggctacgtttgcgagaggaaggatttgctggtaaatggctgctgtaatgtcaacgtccctagcacgaagcagtactgctgtgatggctgctggcccaacggctgctgcagcgcctatgagtactgtgtctcctgctgcctgcagcccaacaagcaacttctcctggagcgcttcctcaaccgggcagccgtggcattccagaacctcttcatggcagtcgaagatcactttgagttgtgcctggccaaatgcaggacctcatctcagagcgtgcagcatgagaacacctaccgggaccccatagcaaagtattgctatggagaaagcccgcccgagctcttccccgcttgacgggtgcagcggacttgctccagcctgggtgaggaggccccgctgaagaactcgcctcctgggacccagcttcagccatcgggccaggctgcaggaagaagacaaaggcagcgtgaggaaaccttggctttgaccccttctcgtgttgtcatctttggcttcgctcaccacccgggcttaccagatggaactcttctgtaaagcagcttggcccctccagccagtcccattcgggaaagatgaaaccggaggccgggctcacggtggtggtggagttcttggatgactcagccctgggacctgcacagggacctgtgacttgtgttcatcgggggccggtgtcacttccagttttgatccaggctctttcactgtaaaattatttattggattcctttggagtaatgggaacattctaatgttttatgtaggaaaatgccttgccattctagttgaatatgttcaaggaagttatttttgttgttgttctgtgttctcgagtttcaggagttaaatcattcttccacccagatacaacattttctcttttaggacgtgaatattctctctaggcagttatttttgtttgtatttcgacagtatcaagcataggccctgaacgtgacctgttagccatatcctgacgtgtaaaattatctaaaaactcagacactcttccattctaatctaactgcacgatttctaacagtgggcaccatgtgcctgccctcaggttattttccagtggtagtcgaatgtgctcatataccctatggagagcactgttttagcagaaatctaatttctcttcctggaggaatttgttctcatttcttttgccacttaaaattaactgtgggctactcagccagggtacagtgggagcctcaggaaggtcagaggcaacctcctcccctgttctatcaatagaaacccaacgttgaggcaattcctaaacagacgcacctcgtagcttgctgtatgtgtttattctttattgctttcagctttggggctgtaacaggtacaaatatttggtttccctatgatttatagagaagaagaagaaacccagctttctatcagagcactgcaagagaagagtcttacacctgccctcagtgggagatgagaatggtcattatgacttagagaatgctacacgtgtaggttgctggtgtgtcctgaatccacaggcataaagcactccccatttttcctactgtaatgcagattctccggctcaaggtctagaatatttgatcctaagatcaagacatcatgcccttcgaatagtactgctctttgttttcaggagtcacgtgaacacacaactctcctatattcctcacaaacctcaggattgagcaaggtctttgtaatttttttggttcactttattgacctgggagcaaggtgctaattctgtggtcagtattcaatgtttttttcagtggagctttttctttgggccatatttgccttctaatacattcctgcaatatgtagtggtgatttcccttagcttcctcctactacctcttatactcatctccccaaattatttgcctcccttaaataagttttcctagaaggtaagctggtcaggcaatttgaaaaatattagatcccaagaaatctattccgtttgcattggacttctcggattccatgtgtttgcagcaggactacatcgaactctgatgtgccggattgtggcatgtctgcatgtctcatccatctattgtttttggtaactcagtttggaatttcagtgtctgtcttccctgggttgacattggaatcagcctctcctttgagcttattttaactcttgagcaacataacatagatttaatgtgaacagtttataccaaagggcagcctgtgcctgtttatggatcctctctgcctttgtacttgaagagcgcattttacatttccagtcctttcacagacaggagctccaaccttacgatggagaattaaacttgcttgtatttccactttgtggatgagaaaaaaaaaaaaaaaaaaaaaaa

SEQ ID NO: 296 - DNA, 2643 bp, Homo sapiens
aattcggcgtcggactctgcgccccgcgtagttccggtggcgactgcggcgcatggcggccctgggacatcttgctggggaggcagcggcggccccaggcccgggtactccctgcgcgtcccgcggagcccggcttcccggcccagtttccagcgcccggaatccttccactgtctgtctctgcccagagcaacctacgtgcagtaacgctgactccagagcgcacccgttgggcgatgaaggcggcacagcgtcgaaaaaacaaaagaataagaagaaaacgcggaacagggcctctgtggcaaatggaggcgagaaggcctcagagaaactcgccccagaagaagttcccctaagcgctgaggcccaggcacaacagttggcccaggaattggcttggtgtgtggagcaactggagctgggcctcaagaggcagaaacccaccccgaaacagaaagagcaggctattggagcaatccgaaccctgcgcagcaaaagaacgcccttgccccggaagaggcagctgatgcactccttgtttggagactatagggctcagatggaagccgaatggcgtgaggccctgcgggctctcagagctgctgcttattcagcccaggtgcaacctgtagatggagccaccagaaagaagagccaaagggtctgcaggcctcgctctatatggagagccaaagccactctggacatgcctgatgaagagtttaggttcaatttcttttagcgtctccccgaacctgaaacaatccccctcccttggggtggtgtaggggtttgttttgagtgcagagcctttccaggacttctgttgtcagagaaccctggagttggtctgtccctggctggtccaaggatttgtagctgttgtgaaggtgtgagaccatcagataggcaaaagaccccgttcgttttctgatgaaatgttctctctttcagaagagagagagaggtgcatttagaaaatatgcaataaattgaagtgagtgttcaaagtattgtagaaggaatattgtactcagtctttaggattagattaagtggctgttggtaacaaagattagtggagaagctgtataatcgtacactggttttcacttttgaaaggaatccctgtcaaatggtttagtgcttaatgctgttatgtcatattgccctaatctctatttttgataaaattggataaggagtgaaagagtatgctgaccacctatgttagaggaagtacagaagatgcaggggtgtggtatccctgggtccagtccctcacctggtacctttgcgcatgttgccttcattcctgagcaggtatcatcctcagggaaccagcatggcacctaccaggccaggctctgttcttaggagcaaggagcttcttgcgctaacagttctggcctgagacctggattgagccttggcagacttcttgtctaaatgttggccattcagtctcaggccctctgttccatggaattgggaatctccaggtgacctaatcctcattggtggcttgatgtttgctggtatcttccaaactcagttcccagactagattgatacctggagcccagctgcctactcagcatttccacttgggtgcttcataggcatttcaaacctgatgtgtttaaaacacttgattaggctccggttttcctttggcttctgcttttcagtgaatggcatgactgcctatgtgggtggcaagccacccaggtgccgaggaaagagactgagggcacgagctgttccagtataataaaatatataaaataagaagagttatactagatccagatcatagacatgattatatgtgagtatcattaatcattagtttatagcaattactctttattccaatattataataatcctcaccctacaatcataacctaggaaaaaccaggccatacagagataggagccgaggggacatagtgcgaagtggccagaagacaagagtgtgagccttctcttatgcctggacagggccaccagagggcttggtctagcagtaacaccagtgtctgggaagatgcctgttgcaaagtggaccatggtctagcagtagcatcagtgtcaaggaaaaacacccactacttagcagactgggaaaaggagcctccctttccccgggggagtttagagaagactactcctccacctcttgtggagggcctgacatcagtcaggcccgcccgcagttatccagaggcctgtctccctgtgatgctgtgcttcagtggtcacgctcctagtccgctttcatgttccatcctgtatacctggctctgccttttagatagcaggagcaaattagtgaaagtactaaatgtctgatatgcagaaataatggcataagctgtctctctctcttctctctctctctgcctctgctgccaggcagggaagggccccctgtccagtggacacatgacccatgtgaccttacctattattggagatggttcacattccttaccctgcccctttgtcttatatccaataaatatcagtgcagcctggcatttggggccactactggtctccgcgtcttggtggtagtggtcccccaggcccaggtgtcttttcttttaaaaaaaaaaaaaaaaaaaaaaaaaaaaa

SEQ ID NO: 297 - DNA, 1442 bp, Homo sapiens
gctctgctccaggcatctgccacaatgtgggtgcttacacctgctgcttttgctgggaagctcttgagtgtgttcaggcaacctctgagctctctgtggaggagcctggtcccgctgttctgctggctgagggcaaccttctggctgcgagctaccaagaggagaaagcagcagctggtcctgagagggccagatgagaccaaagaggaggaagaggaccctcctctgcccaccaccccaaccagcgtcaactatcacttcactcgccagtgcaactacaaatgcggcttctgtttccacacagccaaaacatcctttgtgctgccccttgaggaagcaaagagaggattgcttttgcttaaggaagctggtatggagaagatcaacttttcaggtggagagccatttcttcaagaccggggagaatacctgggcaagttggtgaggttctgcaaagtagagttgcggctgcccagcgtgagcatcgtgagcaatggaagcctgatccgggagaggtggttccagaattatggtgagtatttggacattctcgctatctcctgtgacagctttgacgaggaagtcaatgtccttattggccgtggccaaggaaagaagaaccatgtggaaaaccttcaaaagctgaggaggtggtgtagggattatagagtcgctttcaagataaattctgtcattaatcgtttcaacgtggaagaggacatgacggaacagatcaaagcactaaaccctgtccgctggaaagtgttccagtgcctcttaattgagggtgagaattgtggagaagatgctctaagagaagcagaaagatttgttattggtgatgaagaatttgaaagattcttggagcgccacaaagaagtgtcctgcttggtgcctgaatctaaccagaagatgaaagactcctaccttattctggatgaatatatgcgctttctgaactgtagaaagggacggaaggacccttccaagtccatcctggatgttggtgtagaagaagctataaaattcagtggatttgatgaaaagatgtttctgaagcgaggaggaaaatacatatggagtaaggctgatctgaagctggattggtagagcggaaagtggaacgagacttcaacacaccagtgggaaaactcctagagtaactgccattgtctgcaatactatcccgttggtatttcccagtggctgaaaacctgattttctgctgcacgtggcatctgattacctgtggtcactgaacacacgaataacttggatagcaaatcctgagacaatggaaaaccattaactttacttcattggcttataaccttgttgttattgaaacagcacttctgtttttgagtttgttttagctaaaaagaaggaatacacacaggaataatgaccccaaaaaaaaaaaaaaaaaaaaaaaaaaaaaa

SEQ ID NO: 298 - DNA, 3445 bp, Homo sapiens; identical to SEQ ID NO: 194

SEQ ID NO: 299 - DNA, 15534 bp, Homo sapiens
ccagccgtgtgtgatgagtggccacaccttgcctcctcttcccgtcccaggcaccaacagcacagagcaggccagtgtacccagagccatggcagccacgctgggagccggcacgccccccaggccccaggccaggagcatagctggggtgtatgtggaggcctcgggccaggcccagagtgtctacgccgccatggagcagggcctcctgcctgctgggctcgggcaggctctgctagaggcccaggcagccactgggggcctggtggacctcgcccggggccagctgctccctgtgtccaaggccctgcagcagggtctggtggggctggagctgaaggagaagctgctggccgctgagcgtgccactacgggctatcctgacccctacggcggtgagaagctggccctctttcaggccatcgggaaggaggttgtggacagggccctggggcagagctggctggaggtccaactggccactgggggcctggtggaccccgcccagggagtgctcgtggcccctgagccagcctgccaccagggcctcctggaccgggagacatggcacaagctgtcagagcttgagcctggcacaggtgacctgcgcttcctcaaccccaacacgctggagcggctgacataccaccagctgctggaaaggtgtgtgcgtgcccccgggtcggggctagccttgctgcccctcaagatcaccttccgctccatgggcggggcggtgagtgcagctgagctgctggaggtgggcatcctggacgagcaggctgtgcagggtctgcgggagggcaggctggccgcagtggacgtgagtgcacgtgccgaggtgcggcgctacctggagggtaccggcagcgtggccggggttgtcctgctgcccgaaggccacaagaagagctttttccaggctgccaccgagcacctgctcccaatgggcaccgcgctgccactcctagaggcccaggctgccacccacaccctggtggaccccatcacaggccagcggctgtgggtagacgaggcagtcagggcgggcctggtcagcccagagctccatgagcagctcctggtggctgagcaggccgtgacagggcaccacgaccccttcagtggctcccaaatcccccttttccaggccatgaagaaggggctagtggacaggccactagcactgcggctcttggatgcccagctggccacaggcgggctggtctgtccagcacgcaggctccggctgcccctggaggccgccctgcgctgcggctgcctggatgaagacactcagcggcagctctcgcaggctggcagcttctcagacggcacgcacggcggcctgcgctatgaacagctgctggccctctgtgtcaccgacccagagaccgggcttgccttcctgccactctcagggggaccccggggaggggagccccagggacccccattcatcaagtacagcactcggcaggccctgagcacggccacagccaccgtctctgtggggaagttccggggccggcccgtgtccctctgggagctgctcttctctgaggccatctcctcagagcagagggcgatgctggcccagcagtaccaggaagggaccctctccgtggagaagctggccgctgagctgagcgccacccttgagcaggctgcagccactgccagggtcaccttttctgggctgagggacaccgtgacaccaggagagctgctgaaagccgagatcatcgaccaggacctgtacgagcggttggagcatggacaggccacagccaaggatgtgggcagcctggcctcggcgcagaggtacctgcagggtacgggctgcattgctggcctgctgctccctggctcccaggaacgcctgagcatctatgaggcccgatgcaaggggctcctccggcccggcactgccctcatccttctggaggcacaagctgccacaggcttcatcatcgacccaaaagcaaacaaggggcactccgttgaggaggcactgagggctgctgtcattgggcctgatgtgttcgcgaagctgctgtcggctgagcgcgctgtcactggctacactgacccctacaccgggcagcagatctccctcttccaggccatgcagaagggcctcatcgtccgggagcacggcatccgcctgctggaggcccagatcgccacgggcggcgtcatcgaccccgtgcacagccaccgcgtgcccgtggacgtggcctaccggcgcggctacttcgatcagatgctgaacttgatcctgttggacccttctgacgacaccaagggcttcttcgaccccaacacgcacgagaacctcacgtacctgcagcttctggagcgctgtgtgcgtgaccccgagacgggcctgtacctcctgccactcagcagcacgcagtccccgctggtggacagtgccacccagcaggccttccagaacctgctgctctccgtgaagtatggacggtttcaggggcagagggtctccgcgtgggagctgatcaactctgagtacttcagcgagggccgcaggaggcagctgctgcgtcgctaccggcagcgcgaggtcacgctggggcaggtggcaaagctgctggaggcggagacgcagagacaggcggacatcatgctgcccgcactgcggagccgggtcaccgtccaccagctcctggaggccggtatcattgaccagcagctgttggaccaagtgctggccgggacaatcagcccggaggccctcctactcatggacggcgtccgcaggtacctgtgcggcctgggagctgtgggcggtgtgcggctgctgccctctggccagcggctcagcctctaccaggccatgaggcagaagctgctggggcccagggtggccctggccctgctggaggcccaggcggccaccggaaccatcatggaccctcacagcccagagagcctctcggtggatgaggccgtgcgcaggggtgtggtggggccggagctgtatggcaggctgaagcgggctgagggtgccattgctggcttcagagaccccttctctgggaagcaggtgtctgtgttccaggccatgaagaaaggtctcatcccttgggagcaagctgcccgcctcctggaggctcaagtggccacaggagggatcattgaccccaccagccaccaccacctccccatgccagtggccattcagcgtggctatgttgaccaggagatggagacagccttgtccagctcctccgagaccttccccacaccggacggccaggggcgcacgagctatgcccagctcctggaggagtgccccagggatgagacttctggccttcacctcctgcccctgccagaaagtgctcctgccctccccaccgaggagcaggtccagaggagcctgcaggccgtgccgggggccaaggatggcacatccctctgggacctgctcagctcctgccacttcaccgaggagcaacggaggggcctgctggaggacgtgcaggaggggaggaccactgtgccacagctgctagcctctgtgcagaggtgggtacaggagaccaagcttctggcccaggcccgcgtcatggtgcccggcccacggggtgaggtacccgctgtctggctgctggatgctggcatcatcacccaggagacccttgaggccctggctcagggcacgcagtcgcccgcccaggtcgccgagcagccggcggtgaaggcctgcctgtggggcacaggctgcgtggccggtgtgctgctacagccctctggggccaaggccagcatcgcccaggccgtgagggatggcctcctgcccacaggcctgggccagaggctgctggaagcccaggtggcatctggcttccttgttgaccccctgaacaaccagagactgtcagtggaggacgcggttaaggtcggcctggtgggcagggagctgagtgagcagctcgggcaggccgagagggcggcggccgggtacccagatccctactctagggcctccctctctctgtggcaggccatggagaaggggctcgtgccacagaacgagggcttgcccctcctgcaggtgcagctggccacagggggtgtggtggaccctgtccacggggtgcacctgccccaggcggcagcctgcagactcggccttctggacacacagacgagccaggtgctgactgcagttgacaaggacaacaagttcttctttgaccccagtgcgcgggaccaggtgacctaccagcagctcagggagcgctgcgtgtgcgactccgagaccggattgttgctgttgccactgccttcagacacagtgcttgaggtggacgaccacaccgcggtggctctgagggccatgaaggtgcccgtcagcacagggaggtttaaggggtgtagcgtgtcactctgggacctgctgctctccgaatacgttggcgctgacaagcggcgggagctggtggcactctgtcggtctgggagggctgcggccctgcggcaggtggtcagcgcagtcaccgccctggtcgaggctgcagagaggcagcccctgcaggccaccttcagagggctccggaagcaggtgtcagccagggacctgttcagggcgcagctgatcagcaggaagacgctggacgagctgagccaggggacaacgactgtgaaggaggtggcggagatggacagcgtgaagcggtccctggagggaggcaacttcattgccggggtccttatccagggcacccaggagaggatgagcatcccagaggccctgaggaggcacatcctgcggcctggcacagccctggtgctgctggaggcacaggcagctaccggcttcatcatcgaccccgcggagaaccggaagctgaccgtggaggaggcgttcaaagcaggaatgttcgggaaagaaacctacgtgaagctgctgtcggccgagcgcgccgtcaccggctacaccgacccctataccgggcagcagatctccctcttccaggccatgcagaaggacctcatcgtccgggagcacggcatccgcctgctggaggcccagatcgccacgggcggcatcatcgaccccgtgcacagccaccgcgtgcccgtggacgtggcctaccgctgcggctacttcgacgaggagatgaaccgcatcctggcggaccccagcgacgacaccaagggcttcttcgaccccaacacgcacgagaacctcacgtacctgcagcttctggagcgctgtgtggaggaccccgagacgggcctgtacctgctacaaatcataaagaaaggagaaaactacgtgtacatcaatgaggccacgagacacgtgttgcaatccagaactgcaaaaatgcgcgtggggaggtttgctgaccaggtggtctctttctgggacctgctgtcctctccatacttcacagaggacaggaagcgggagctcatccaggagtatggagcccagagtgggggcctggagaaattgctggaaatcatcaccacgacaattgaagaaacagagacgcaaaaccaaggcatcaaagtggcggccatcagaggggaggtgacagctgcagacctgttcaactccagggtcatcgatcagaagaccctgcacacacttcgtgtggggaggactgggggacaggcactcagcacgctggagtgtgtgaagccctatctggaaggcagcgactgcattgcgggggtcacggtgccctccaccagggaggtcatgagcctccatgaggccagcaggaaggagctcatccctgcagcatttgcgacttggctgctggaggcgcaggccgccaccgggttcctcctggacccctgcacccgccagaagctctctgtggatgaggctgtggatgtgggcctggtgaacgaggagctgcgggagaggctcctgaaggctgaaagagctgccacgggctacagggatccggccacaggagacacgatcccgctgttccaggccatgcagaagcagctcatcgagaaggcggaggcactgaggctgctggaggtgcaggtggccacggggggtgtcatcgacccacagcaccaccaccggctcccactggaaacagcctacagacggggctgtctgcacaaggacatctatgcgctcatttccgaccagaagcacatgaggaaacggtttgtggacccgaacacgcaagagaaggtctcgtaccgagagctgcaggagaggtgccgcccacaagaggacacgggctgggtgctgttcccagtgaacaaggctgcacgggactccgagcacatcgatgacgagacgagaagggccctggaggcagagcaagtggaaatcacagtgggaaggttcagaggccagaaaccaacactgtgggcactactgaattccgaatacgtgacagaggagaagaagctccagctggtgaggatgtatagaacacacaccagacgggcactgcagacggtagcgcagctcatcttagagttgatcgagaagcaggaaaccagcaacaaacacctgtggttccaaggaattagacgacagatcacagcttctgaactcctcagctcagccataatcacggaggaaatgctccaggacctggaaacgggacggagcacgacgcaagagctcatggaggacgaccgcgtcaagcgctacctggagggcaccagctgcatcgcgggcgtcctggtgcccgccaaggaccagcccggccgccaggagaagatgagcatctaccaggccatgtggaagggcgtgctgcggcccggcacggccctggtgctgctggaggcgcaggcggccaccggcttcgtcatcgaccccgtgcgcaacctgaggctgtcggtggaggagcccgtgcccgcgggcgtggtgggcagcgagatccaggagaagctgctgtcggccgagcgcgccgtcaccggctacaccgacccctacaccgggcagcagatctccctcttccaggccatgcagaaggacctcatcgtccgggagcacggcatccgcctgctggaggcccagatcgccacgggcggcgtcatcgaccccgtgcacagccaccgcgtgcccgtggacgtggcctaccggcgcggctacttcgacgaggagatgaaccgtgtcctggccgaccccagcgacgacaccaagggtttcttcgaccccaacacgcacgagaacctcacgtacgtgcagctgctgcgccgctgcgtgcccgacccggacaccgggctctacatgctgcagctggcaggccggggctccgccgtgcaccagctgagcgaggagctgcgctgtgccctgcgcgacgcccgcgtgacgccaggctcgggcgccctccagggccagagcgtctccgtctgggagctcctcttctaccgcgaggtgtccgaggaccggcgccaggacctgctgagcagataccgggcgggcacgctgaccgtggaggagctgggcgccaccctcacctcgctgctggcccaggcccaggcccaggcccgggccgaggccgaggccgggagcccgcgcccagacccccgggaggccctgcgtgcggccaccatggaggtcaaggtgggccgcctccgggggcgcgcggtgcccgtgtgggacgtgctggcgtccggctacgtgagcagggccgcccgggaggagctgctggccgagtttggctcggggaccctggacttgcccgcgctgacccgccggctgaccgccatcatcgaggaggccgaggaagcccccggggcccggccgcagctccaggacgccaggcgcggcccgcgggagccagggccagccgggcgaggggacggcgactcggggcgctcccagcgagagggccagggggagggcgagacccaggaggccgccgccgccgccgccgccgcccgccgccaggagcagaccctgcgtgatgccaccatggaggtgcagcgcgggcagttccaggggcggccggtctccgtgtgggacgtcctcttctcctcgtacctgagcgaggcccgccgagacgagctcctggcccagcacgcggccggcgccctgggcctgcccgacctcgtcgccgtcctcacccgggtcatcgaggagacggaggagcggctcagcaaggtgtccttccgcggcctgaggcgccaggtgtccgcctccgagctgcacacgtccgggatcctgggccccgagaccctgcgggacctggcccagggcactaagacgctgcaggaggtgacggagatggactcggtcaagcgctacctggagggcaccagctgcatcgcgggcgtcctggtgcccgccaaggaccagcccggccgccaggagaagatgagcatctaccaggccatgtggaagggcgtgctgcggcccggcacggccctggtgctgctggaggcgcaggcggccaccggcttcgtcatcgaccccgtgcgcaacctgaggctgtcggtggaggaggccgtggccgcgggcgtggtgggcggcgagatccaggagaagctgctgtcggccgagcgcgccgtcaccggctacaccgacccctacaccgggcagcagatctccctcttccaggccatgcagaaggacctcatcgtccgggagcacggcatccgcctgctggaggcccagatcgccacgggcggcgtcatcgaccccgtgcacagccaccgcgtgcccgtggacgtggcctaccggcgcggctacttcgacgaggagatgaaccgtgtcctggccgaccccagcgacgacaccaagggtttcttcgaccccaacacgcacgagaacctcacgtacgtgcagctgctgcgccgctgcgtgcccgacccggacaccgggctctacatgctgcagctggcaggccggggctccgccgtgcaccagctgagcgaggagctgcgctgtgccctgcgcgacgcccgcgtgacgccaggctcgggcgccctccagggccagagcgtctccgtctgggagctcctcttctaccgcgaggtgtccgaggaccggcgccaggacctgctgagcagataccgggcgggcacgctgaccgtggaggagctgggcgccaccctcacctcgctgctggcccaggcccaggcccaggcccgggccgaggccgaggccgggagcccgcgcccagacccccgggaggccctgcgtgcggccaccatggaggtcaaggtgggccgcctccgggggcgcgcggtgcccgtgtgggacgtgctggcgtccggctacgtgagcggggccgcccgggaggagctgctggccgagtttggctcggggaccctggacttgcccgcgctgacccgccggctgaccgccatcatcgaggaggccgaggaggcccccggggcccggccgcagctccaggacgcctggcgcggcccgcgggagccagggccagccgggcgaggggacggcgactcggggcgctcccagcgagagggccagggggagggcgagacccaggaggccgccgccgccgccgccgccgcccgccgccaggagcagaccctgcgtgatgccaccatggaggtgcagcgcgggcagttccaggggcggccggtctccgtgtgggacgtcctcttctcctcgtacctgagcgaggcccgccgagacgagctcctggcccagcacgcggccggcgccctgggcctgcccgacctcgtcgccgtcctcacccgggtcatcgaggagacggaggagcggctcagcaaggtgtccttccgcggcctgaggcgccaggtgtccgcctccgagctgcacacgtccgggatcctgggccccgagaccctgcgggacctggcccagggcactaagacgctgcaggaggtgacggagatggactcggtcaagcgctacctggagggcaccagctgcatcgcgggcgtcctggtgcccgccaaggaccagcccggccgccaggagaagatgagcatctaccaggccatgtggaagggcgtgctgcggcccggcacggccctggtgctgctggaggcgcaggcggccaccggcttcgtcatcgaccccgtgcgcaacctgaggctgtcggtggaggaggccgtggccgcgggcgtggtgggcggcgagatccaggagaagctgctgtcggccgagcgcgccgtcaccggctacaccgacccctacaccgggcagcagatctccctcttccaggccatgcagaaggacctcatcgtccgggagcacggcatccgcctgctggaggcccagatcgccacgggcggcgtcatcgaccccgtgcacagccaccgcgtgcccgtggacgtggcctaccggcgcggctacttcgacgaggagatgaaccgtgtcctggccgaccccagcgacgacaccaagggtttcttcgaccccaacacgcacgagaacctcacgtacgtgcagctgctgcgccgctgcgtgcccgacccggacaccgggctctacatgctgcagctggcaggccggggctccgccgtgcaccagctgagcgaggagctgcgctgtgccctgcgcgacgcccgcgtgacgccaggctcgggcgccctccagggccagagcgtctccgtctgggagctcctcttctaccgcgaggtgtccgaggaccggcgccaggacctgctgagcagataccgggcgggcacgctgaccgtggaggagctgggcgccaccctcacctcgctgctggcccaggcccaggcccaggcccgggccgaggccgaggccgggagcccgcgcccagacccccgggaggccctgcgtgcggccaccatggaggtcaaggtgggccgcctccgggggcgcgcggtgcccgtgtgggacgtgctggcgtccggctacgtgagcggggccgcccgggaggagctgctggccgagtttggctcggggaccctggacttgcccgcgctgacccgccggctgaccgccatcatcgaggaggccgaggaggcccccggggcccggccgcagctccaggacgcctggcgcggcccgcgggagccagggccagccgggcgaggggacggcgactcggggcgctcccagcgagagggccagggggagggcgagacccaggaggccgccgccgccgccgccgccgcccgccgccaggagcagaccctgcgtgatgccaccatggaggtgcagcgcgggcagttccaggggcggccggtctccgtgtgggacgtcctcttctcctcgtacctgagcgaggcccgccgagacgagctcctggcccagcacgcggccggcgccctgggcctgcccgacctcgtcgccgtcctcacccgggtcatcgaggagacggaggagcggctcagcaaggtgtccttccgcggcctgaggcgccaggtgtccgcctccgagctgcacacgtccgggatcctgggccccgagaccctgcgggacctggcccagggcactaagacgctgcaggaggtgacggagatggactcggtcaagcgctacctggagggcaccagctgcatcgcgggcgtcctggtgcccgccaaggaccagcccggccgccaggagaagatgagcatctaccaggccatgtggaagggcgtgctgcggcccggcacggccctggtgctgctggaggcgcaggcggccaccggcttcgtcatcgaccccgtgcgcaacctgaggctgtcggtggaggaggccgtggccgcgggcgtggtgggcggcgagatccaggagaagctgctgtcggccgagcgcgccgtcaccggctacaccgacccctacaccgggcagcagatctccctcttccaggccatgcagaaggacctcatcgtccgggagcacggcatccgcctgctggaggcccagatcgccacgggcggcgtcatcgaccccgtgcacagccaccgcgtgcccgtggacgtggcctaccggcgcggctacttcgacgaggagatgaaccgtgtcctggccgaccccagcgacgacaccaagggcttcttcgaccccaacacgcacgagaacctcacgtacgtgcagctgctgcgccgctgcgtgcccgacccggacaccgggctctacatgctgcagctggcaggccggggctccgccgtgcaccagctgagcgaggagctgcgctgtgccctgcgcgacgcccgcgtgacgccaggctcgggcgccctccagggccagagcgtctccgtctgggagctcctcttctaccgcgaggtgtccgaggaccggcgccaggacctgctgagcagataccgggcgagcacgctgaccgtggaggagctgggcgccaccctcacctcgctgctggcccaggcccaggcccaggcccgggccgaggccgaggccgggagcccgcgcccagacccccgggaggccctgcgtgcggccaccatggaggtcaaggtgggccgcctccgggggcgcgcggtgcccgtgtgggacgtgctggcgtccggctacgtgagcagggccgcccgggaggagctgctggccgagtttggctcggggaccctggacttgcccgcgctgacccgccggctgaccgccatcatcgaggaggccgaggaggcccccggggcccggccgcagctccaggacgcctggcgcggcccgcgggagccagggccagccgggcgaggggacggcgactcggggcgctcccagcgagagggccagggggagggcgagacccaggaggccgccgccgccaccgccgccgcccgccgccaggagcagaccctgcgtgatgccaccatggaggtgcagcgcgggcagttccaggggcggccggtctccgtgtgggacgtcctcttctcctcgtacctgagcgaggcccgccgagacgagctcctggcccagcacgcggccggcgccctgggcctgcccgacctcgtcgccgtcctcacccgggtcatcgaggagacggaggagcggctcagcaaggtgtccttccgcggcctgaggcgccaggtgtccgcctccgagctgcacacgtccgggatcctgggccccgagaccctgcgggacctggcccagggcactaagacgctgcaggaggtgacggagatggactcggtcaagcgctacctggagggcaccagctgcatcgcgggcgtcctggtgcccgccaaggaccagcccggccgccaggagaagatgagcatctaccaggccatgtggaagggcgtgctgcggcccggcacggccctggtgctgctggaggcgcaggcggccaccggcttcgtcatcgaccccgtgcgcaacctgaggctgtcggtggaggaggccgtggccgcgggcgtggtgggcggcgagatccaggagaagctgctgtcggccgagcgcgccgtcaccggctacaccgacccctacaccgggcagcagatctccctcttccaggccatgcagaaggacctcatcgtccgggagcacggcatccgcctgctggaggcccagatcgccacgggcggcgtcatcgaccccgtgcacagccaccgcgtgcccgtggacgtggcctaccggcgcggctacttcgacgaggagatgaaccgtgtcctggccgaccccagcgacgacaccaagggcttcttcgaccccaacacgcacgagaacctcacgtacgtgcagctgctgcgccgctgcgtgcccgacccggacaccgggctctacatgctgcagctggcaggccggggctccgccgtgcaccagctgagcgaggagctgcgctgtgccctgcgcgacgcccgcgtgacgccaggctcgggcgccctccagggccagagcgtctccgtctgggagctcctcttctaccgcgaggtgtccgaggaccggcgccaggacctgctgagcagataccgggcgggcacgctgaccgtggaggagctgggcgccaccctcacctcgctgctggcccaggcccaggcccaggcccgggccgaggccgaggccgggagcccgcgcccagacccccgggaggccctgcgtgcggccaccatggaggtcaaggtgggccgcctccgggggcgcgcggtgcccgtgtgggacgtgctggcgtccggctacgtgagcggggccgcccgggaggagctgctggccgagtttggctcggggaccctggacttgcccgcgctgacccgccggctgaccgccatcatcgaggaggccgaggaggcccccggggcccggccgcagctccaggacgcctggcgcggcccgcgggagccagggccagccgggcgaggggacggcgactcggggcgctcccagcgagagggccagggggagggcgagacccaggaggccgccgccgccgccgccgccgcccgccgccaggagcagaccctgcgtgatgccaccatggaggtgcagcgcgggcagttccaggggcggccggtctccgtgtgggacgtcctcttctcctcgtacctgagcgaggcccgccgagacgagctcctggcccagcacgcggccggcgccctgggcctgcccgacctcgtcgccgtcctcacccgggtcatcgaggagacggaggagcggctcagcaaggtgtccttccgcggcctgaggcgccaggtgtccgcctccgagctgcacacgtccgggatcctgggccccgagaccctgcgggacctggcccagggcactaagacgctgcaggaggtgacggagatggactcggtcaagcgctacctggagggcaccagctgcatcgcgggcgtcctggtgcccgccaaggaccagcccggccgccaggagaagatgagcatctaccaggccatgtggaagggcgtgctgcggcccggcacggccctggtgctgctggaggcgcaggcggccaccggcttcgtcatcgaccccgtgcgcaacctgaggctgtcggtggaggaggccgtggccgcgggcgtggtgggcggcgagatccaggagaagctgctgtcggccgagcgcgccgtcaccggctacaccgacccctacaccgggcagcagatctccctcttccaggccatgcagaaggacctcatcgtccgggagcacggcatccgcctgctggaggcccagatcgccacgggcggcgtcatcgaccccgtgcacagccaccgcgtgcccgtggacgtggcctaccggcgcggctacttcgacgaggagatgaaccgcgtcctggccgaccccagcgacgacaccaagggcttcttcgaccccaacacgcacgagaacctcacgtacctgcagcttctgcagagggccaccctggaccctgagacggggctcctatttctttctctctctctacagtgactgggcttcctccgtgcagttttctgcaactctggagaagttgaggcatacttgtgtgtctgggttgtttttttttttttttgtcattctttaattttgttgttttacccattcgttatctgtggaaaacgttttaagttgtcatgtgacagaaacttttcctttgtccatcgaggtgtttcataagttttttggtgtgttttctgggtcgtctatgtgtcatatggttttacttttctcccggaatt

SEQ ID NO: 300 - DNA, 3243 bp, Homo sapiens; identical to SEQ ID NO: 199

SEQ ID NO: 301 - DNA, 3159 bp, Homo sapiens; identical to SEQ ID NO: 198

SEQ ID NO: 302 - DNA, 1449 bp, Homo sapiens
cttttcctgtggcagcagccgggctgagaggagcgtggctgtctcctctctccgccatggcgtgtgctcgcccactgatatcggtgtactccgaaaagggggagtcatctggcaaaaatgtcactttgcctgctgtattcaaggctcctattcgaccagatattgtgaactttgttcacaccaacttgcgcaaaaacaacagacagccctatgctgtcagtgaattagcaggtcatcagactagtgctgagtcttggggtactggcagagctgtggctcgaattcccagagttcgaggtggtgggactcaccgctctggccagggtgcttttggaaacatgtgtcgtggaggccgaatgtttgcaccaaccaaaacctggcgccgttggcatcgtagagtgaacacaacccaaaaacgatacgccatctgttctgccctggctgcctcagccctaccagcactggtcatgtctaaaggtcatcgtattgaggaagttcctgaacttcctttggtagttgaagataaagttgaaggctacaagaagaccaaggaagctgttttgctccttaagaaacttaaagcctggaatgatatcaaaaaggtctatgcctctcagcgaatgagagctggcaaaggcaaaatgagaaaccgtcgccgtatccagcgcaggggcccgtgcatcatctataatgaggataatggtatcatcaaggccttcagaaacatccctggaattactctgcttaatgtaagcaagctgaacattttgaagcttgctcctggtgggcatgtgggacgtttctgcatttggactgaaagtgctttccggaagttagatgaattgtacggcacttggcgtaaagccgcttccctcaagagtaactacaatcttcccatgcacaagatgattaatacagatcttagcagaatcttgaaaagcccagagatccaaagagcccttcgagcaccacgcaagaagatccatcgcagagtcctaaagaagaacccactgaaaaacttgagaatcatgttgaagctaaacccatatgcaaagaccatgcgccggaacaccattcttcgccaggccaggaatcacaagctccgggtggataaggcagctgctgcagcagcggcactacaagccaaatcagatgagaaggcggcggttgcaggcaagaagcctgtggtaggtaagaaaggaaagaaggctgctgttggtgttaagaagcagaagaagcctctggtgggaaaaaaggcagcagctaccaagaaaccagcccctgaaaagaagcctgcagagaagaaacctactacagaggagaagaagcctgctgcataaactcttaaatttgattattccataaaggtcaaatcattttggacagcttcttttgaataaagacctgattatacaggcagtgagaaacatgaaaaaaaaaaaaaaaaaa

SEQ ID NO: 303 - DNA, 2590 bp, Homo sapiens
ccccatccctataggagctggtgagattgcagcctgctgcctcccctccatcaaccacagctattggatttcccacccagaatctttaggtaaatgagatcatgattctggaaggaggtggtgtaatgaatctcaaccccggcaacaacctccttcaccagccgccagcctggacagacagctactccacgtgcaatgtttccagtgggttttttggaggccagtggcatgaaattcatcctcagtactggaccaagtaccaggtgtgggagtggctccagcacctcctggacaccaaccagctggatgccaattgtatccctttccaagagttcgacatcaacggcgagcacctttgcagcatgagtttgcaggagttcacccgggcggcagggacggcggggcagctcctctacagcaacttgcagcatctgaagtggaacggccagtgcagtagtgacctgttccagtccacacacaatgtcattgtcaagactgaacaaactgagccttccatcatgaacacctggaaagacgagaactatttatatgacaccaactatggtagcacagtagatttgttggacagcaaaactttctgccgggctcagatctccatgacaaccaccagtcaccttcctgttgcagagtcacctgatatgaaaaaggagcaagacccccctgccgagtgccacaccaaaaagcacaacccgagagggactcacttatgggaattcatccgcgacatcctcttgaacccagacaagaacccaggattaataaaatgggaagaccgatctgagggcgtcttcaggttcttgaaatcagaggcagtggctcagctatggggtaaaaagaagaacaacagcagcatgacctatgaaaagctcagccgagctatgagatattactacaaaagagaaattctggagcgtgtggatggacgaagactggtatataaatttgggaagaatgcccgaggatggagagaaaatgaaaactgaagctgccaatactttggacacaaaccaaaacacacaccaaataatcagaaacaaagaactcctggacgtaaatatttcaaagactacttttctctgatatttatgtaccatgaggggaacaagaaactacttctaacgggaagaagaaacactacagtcgattaaaaaaattattttgttacttcgaagtatgtcctatatggggaaaaaacgtacacagttttctgtgaaatatgatgctgtatgtggttgtgattttttttcacctctattgtgaattctttttcactgcaagagtaacaggatttgtagccttgtgcttcttgctaagagaaagaaaaacaaaatcagagggcattaaatgttttgtatgtgacatgatttagaaaaaggtgatgcatcctcctcacataagcatccatatggcttcgtcaagggaggtgaacattgttgctgagttaaattccagggtctcagatggttaggacaaagtggatggatgccgggaagtttaacctgagccttaggatccaatgagtggagaatggggacttccaaaacccaaggttggctataatctctgcataaccacatgacttggaatgcttaaatcagcaagaagaataatggtggggtctttatactcattcaggaatggtttatctgatgccagggctgtcttcctttctcccctttggatggttggtgaaatactttaattgccctgtctgctcacttctagctatttaagagagaacccagcttggttcttttttgctccaagtgcttaaaaataagttggaaaaaggagacggtggtgtggaaatggctgaagagtttgctcttgtatccctatagtccaaggtttctcaatctgcacaattgacatttttggccggagtgttctttgtggtgagggctttcctgtgcattgtaagatgttcagcagtatccactcatggtctctaaccacttgacaccagaaaccccccagctgtgataacgcaaaatgtctctagacatcaccaaatgttccctgggggtggcaaatttgcccttgattgagaaccaccagtttagctagtcaatatgaggatggtggtttattctcagaagaaaaagatatgtaagtcttttagctcctaagagtgaagcaaaagcaagacttcaacttcaacctatcttaatgttttaaatgttagggacaataagttgaaatagttagaggagcttcttttcagaaccccagatgagagccaatgtcagataaagtaagcatagcaatgtagcaggaactacaatagaagacattttcactggaattacaaagcagaattaaaattatattgtagaaggaaacaccaagaaaagaatttccagggaaaatcctctttgcaggtattaattcttataattttttgtcttttggattatctgtttactgtctcatctgaactgatcccaggtgaacggtttattgcctagatttgtactcagaggaattttttttgttttgttttgtcttctaagaaaggaaagaaaggatgaaaaaaataaacagaaaactcagctcaggcacaattgtc

SEQ ID NO: 304 - DNA, 1691 bp, Homo sapiens
agcgggtttgcgggagcgccgcgtggttagcgtcggcggcttttggcatggcgactttttctggcccggctgggccaatcctgtcgcttaatccgcaggaagatgtcgagtttcaaaaggaggtggcgcaggttcgcaagcgcataacccagcgaaaaaaacaagaacaacttactcctggagtagtctatgtgcgccacctacctaacctacttgacgaaacccagatcttttcatatttctcccagtttggcactgtgacacggttcaggctgtccagaagtaaaaggactggaaatagcaaaggctatgcatttgtggagtttgagtctgaggatgttgccaaaatagttgctgaaacaatgaacaactacctgtttggtgaaagactcttggagtgtcattttatgccacctgaaaaagtacataaagaactctttaaagactggaatattccatttaagcagccatcatatcaatcagtgaaacggtataatcggaatcggacactaacacaaaagctacggatggaggagcgatttaaaaagaaagaaagattactcaggaagaaattagctaaaaaaggaattgactatgattttccttctttgattttacagaaaacggaaagtatttcaaaaactaatcgtcagacgtctacaaaaggccaggttttacgtaagaagaagaaaaaagtttcaggtactcttgacactcctgagaagactgtggatagccagggccccacaccagtttgtacaccaacatttttggagaggcgaaaatctcaagtggctgaactgaatgatgatgataaagatgatgaaatagttttcaaacagcccatatcctgtgtaaaagaagaaatacaagagactcaaacacctacacattcacggaaaaaaagacgaagaagcagcaatcagtgattttcaatgtattatatttcttttgaaaaatataatatttttatgagagtggactttgtatttcactaggtacaatggaatacaacctttgacaagattttcagaggaaaaatacactgtttggtcaagttaaggaaagcagtgtgtaattttggattgcctgcccttggctgaaatacaggggtgcataccatcttgcagtggcttggctgacattgcctctttgtcctggcctctagttttcttttgatatttcatagctctccttagtttactctgcctggatagaaagttgaccactaactgcaggtttaagtactaaactgcagccttttctgtcgccagcaattaaagaccaccaatcttgtttgtccatctacatggtttgtcggggacatttaactcatggaggtgctttagatttcaacatcagatggttgaagctggaagtttaattatatgtagagtgagaaggcagttccagttttagcacagatttgtttatgtgttcagattttaatagagattcaaaaatgactcatttttaccaataatgttaaattagttttggttgtgctagcatgaattaataaccaccattttataccagtatcatcagtgaagaattgtatttcaagattcaaacaataaccagcaattaaacttttttctacaatgtatttgtttgcgagtaggacttgggagtcattggaaaaaaaaaataataaattttccccttcattaacaaaaaaaaaaaaaaaa

SEQ ID NO: 305 - DNA, 1390 bp, Homo sapiens
gtggaggccgccagtcgcggcgatcttctcctcgcttctggagtgttatcgtcaccatgtccctaatggtctcggctggccggggcctgggggccgtgtggtccccaacccacgtgcaggtgacggtgctgcaggcgcggggcctgcgggccaagggccccgggggcacgagcgacgcgtacgcggtgatccaggtgggcaaggagaagtacgccacctccgtgtcggagcgcagcctgggcgcgcccgtgtggcgcgaggaggccaccttcgagctgccatcgctgctgtcctccggacccgcggccgccgccaccctgcagctcaccgtgctgcaccgcgcgctgctcggcctcgacaagttcctgggccgcgccgaggtggacctgcgggatctgcactccagcctgggcaagagtttttttaagactcttaaaaaaagagcctgggcaatttttttaagactctgtcttaaaaaaaactaaaaagaaaaaaagaagccccttcactctacaggggacaggagaccatggattggaccccaaagggattgaactgcatctgcatgtctgtcctttgaacactttctctccctgcccaaaaggaaacccaaattatttgtgggatactggggaaattgtagtgaagggcttaatgtagttaataaaagttaaaagtcagtagaaaacaggtgcctcagccttcaaatggttgctttttttccattttccctcatgaatagactcaccagcattttacccccttgttataaaactgtgcagagcaagaagatgatacttatttttgaatttgtatttttaaaactagatttatagactttttttttttttaactagggcacttgcttccttcttagctaaaagcaccagctgagatttttcaggtaattttgttgttactcacttaagactggaattagaatgtttctggtatttctcatttttttccctggctatgatagaatctcatctaatcttgacatctctcctaggggaagaatatcacaggctaatagcgtggttgggggtgaagatgatagcagttattaaatcaggaatctcttttatgtatgtccttgttacattgaggttaagagacaaaatcattggcagtgcaatctctttccaggatttcgtttgctgtggcattggttatatcagagcactttaatctgaaggatgatactgtaacttgatttatctaattagcttttaattatctacagctattttattttatttaattctctcctacagtactgggaccactgtaaacttctcagatgacttgtatttttgtagtgctatgaaatttatttacatacttataaagaaaactgtatgttcacttgaaaaaaaaaaaaaaaaaa

SEQ ID NO: 306 - DNA, 3950 bp, Homo sapiens
attttgggggtggttggaggcggtggcggcggcggcgaggaggggaatttccttgtgcctccattcccgggaggggggagcggcgttggaggccaccgtttccagcatcaacaacagcaacttgtgattggcggtgaccggatattcagttgcacatccccacatcaatgcactgccaatgggttatatcctgtgttgtgacctcatggtttaagtgggaataaagatgagtataagcagtgatgaggtcaacttcttggtatatagatacttgcaagagtcaggattttctcattcagcatttacctttggtatagaaagccatatcagtcagtccaatataaatggtgccctcgtcccacccgctgcattgatttctatcatccagaaaggtctacagtatgtagaagcagaagttagtattaatgaggatggtaccttgtttgatggtcgaccaatagagtctctgtccctgatagatgccgtaatgcctgatgtagtacaaacaagacaacaagcttatagagataagcttgcacagcaacaggcagcagctgctgcagctgccgcagctgcagccagccaacaaggatctgcaaaaaatggagaaaacacagcaaatggggaggagaatggagcacatactatagcaaataatcatactgatatgatggaagtggatggggatgttgaaatccctcctaataaagctgttgtgttgcggggccatgaatctgaagtttttatctgtgcctggaaccctgttagtgatctcctagcatcagggtctggagactcaacagcaagaatatggaatcttagtgagaacagcaccagtggctctacacagttagtacttagacattgtatacgagaaggagggcaagatgttccaagcaacaaggatgtcacatctctagattggaatagtgaaggtacacttctagcaactggttcctatgatgggtttgccagaatatggactaaagatggtaaccttgctagcaccttagggcagcataaaggccctatatttgcattaaaatggaataagaaaggaaatttcatcctaagtgctggagtagacaagactacaattatttgggacgcacatactggtgaagccaagcaacagtttccttttcattcagcaccagcattggatgttgattggcagagcaacaacacctttgcttcttgtagtacagatatgtgcattcatgtctgtaaattaggacaagacagacctattaaaacattccaaggacatacgaatgaagtaaatgctatcaaatgggacccaactggcaatctcttggcctcctgttctgacgacatgactttaaagatatggagtatgaaacaagacaattgtgtccatgatttgcaagcacataataaagaaatttatactatcaaatggagtccaacaggaccagggactaataatccaaatgccaaccttatgttagcaagtgcatcctttgattctactgttaggttatgggatgtagaccgagggatatgcatccataccttgacaaaacaccaagagcctgtgtacagtgtagctttcagtcctgatggcaggtatctggcaagtggttcttttgacaaatgtgtacacatctggaacacgcagacaggtgctctagttcacagctataggggaacaggtggaatatttgaagtttgctggaatgcagcaggagacaaagttggagccagtgcatcagatggttcagtttgtgtattagaccttcggaaatagcgctactagttggaagccatggaccgactatgaatgtgtacatagccaaaatgactgtccctgacccatgtactgctatagtcccacttgaaccatggccagtccactacagccaaatctaaaagaaatatatacatacagtgtatataaacaaaattgcaccctgaagatgacagagttttgtcacagcttgtgaattctgttcaccaagtgctggaatctaatctgctgtgcccctaaaatagcatttagaagttttggatatgaaaaacagaagagagaaaaatatacattataaaagcagaacatacatgtaccagtttttggatactaaatgacagccttgtttctcccctttgaatcagcagacaccatggattatattctttttttcccttcagtagtgagcagtttgtatgtacagagaaaatggacttacaaaaacttgcagcagtagtttgttcttgctttaaaatttcgtttttggtttagattatggatgcatgaagtaagggagtgaatcagtttcttgtttatatttttttcaccttttaaacaaaaaattctttaaaatattttaatgcattcttttgaagaggtagatgtttggtacattttatggctcccagagcatatattcagttggtgcatgttgtggaagggggaattggaaattaaatgaaaacctatgactttggtcatgtcaatctgtaagacacatcagtaaaagggtattatgctctgttggttttgtttttttgttttgcttttttttttttttttcttttttgttttttggtgatgtggcttaaatgcaatagtttcttttttgggacatatttctgccaattaaagactagaagggcacaactttttttttaattaccatagagaagatacattaaaaaaaatcttctgatgttttgtagccataactaaattatggtaaaaatgtgcactattgtgaaaaggagcaacgtagttttgggttttttgttgtttgtttgttttgctttgttttttaagagattaaaatgtttctggataaggattagcttctcgaagtgtccatcattctgtgtagaagcttaaatatgtaatgtaaccaaactccagtattaaaaatctctcatgttgttttctttatacaaagcaagataacggcatataacactgccattacatggcaaaatgtttgctaccttagtttaaaaaacaatctcaaacaaaagacttgcttcaaggtgtttttaaatagcagtgattcagaattttttttaatgaaagtataattgcactaaccttcttcctgctgctctgattctgcatttgtggtacttgtgactacgttttttcaaatatagatagatttaagctgctaatttttttttttttagtaatcactactatatcatgtcttttactctgtttataatatcaagtattttcttaaagatatagatattaaaccttgtgctcatgcaacttagagtaacatatacagacaaatgattgcatgaggccatgtttatatgtgtgactaataaggcttgtcatgattaacataatccaggtatgtcatttctgaagagaatagtcatcaaatttatatctcgaagattttaattaaggaattgcttattgttgagcttagcaaattaataacactatttctgtcactaattattttgaggccttttagtactaaaattttaacctgtgttctaagtagaaactgatttaacccaagtaatgcagctttgattgatttcagcattcgttgctttgctatttttacaaaacagcattgattgaagcaagtcttggttttactaaggtagggtagcatttgctattggtaaagagaataaatacacttaatttcacaatacattgttatatgtaccccagttgttgttagtggggactatgatactgtaataatatttttaaaaatttacatcaagagaggcagtcattcacgatggttttgtgccagctctttttagggttttggatcacattagagatatttagaacatattaccctgtgacttacgtaggaaacctaatatgctgagtatctggcacttgaattcctgcttttattgctggaggtccacatctgtggttgacctctgttattgtttaaaaaaaaaaaaaaaaaaaaaaaaaaaaa

SEQ ID NO: 307 - DNA, 2856 bp, Homo sapiens
gtaaccgctactcccggacaccagaccaccgccttccgtacacaggggcccgcatcccaccctcccggacctaagagcctgggtcccctgtttccggaggtccgcttcccggcccccagattctggcatcccagccctcagtgtccaagacccaggcagcccgggtccccgcctcccggatccaggcgtccgggatctgcgccaccagaacctagcctcctgcagacctccgccatctgggggcactcaacctcctggagccaagggccccacgtcccacccagagaaactctcgtattcccagctcctagggccaaggaacccgggcgctccgaactcccagctttcggacatctggcacacggggcagagcagagaagctcagcgcccagcctggggaatttaaacactccagcttccaagagccaaggaacttcagtgctgtgaactcacaactctaaggagccctccaaagttccagtctccaggtgctgttactcaactcagtcctaggaacgtcgggtcctgggaaggagcccaagcgctcccagccagcttccaggcgctaagaaaccccggtgcttcccatcatggtggccgatcctcctcgagactccaaggggctcgcagcggcggagcccaccgccaacgggggcctggcgctggcctccatcgaggaccaaggcgcggcagcaggcggctactgcggttcccgggaccaggtgcgccgctgccttcgagccaacctgcttgtgctgctgacagtggtggccgtggtggccggcgtggcgctgggactgggggtgtcgggggccgggggtgcgctggcgttgggcccggagcgcttgagcgccttcgtcttcccgggcgagctgctgctgcgtctgctgcggatgatcatcttgccgctggtggtgtgcagcttgatcggcggcgccgccagcctggaccccggcgcgctcggccgtctgggcgcctgggcgctgctctttttcctggtcaccacgctgctggcgtcggcgctcggagtgggcttggcgctggctctgcagccgggcgccgcctccgccgccatcaacgcctccgtgggagccgcgggcagtgccgaaaatgcccccagcaaggaggtgctcgattcgttcctggatcttgcgagaaatatcttcccttccaacctggtgtcagcagcctttcgctcatactctaccacctatgaagagaggaatatcaccggaaccagggtgaaggtgcccgtggggcaggaggtggaggggatgaacatcctgggcttggtagtgtttgccatcgtctttggtgtggcgctgcggaagctggggcctgaaggggagctgcttatccgcttcttcaactccttcaatgaggccaccatggttctggtctcctggatcatgtggtacgcccctgtgggcatcatgttcctggtggctggcaagatcgtggagatggaggatgtgggtttactctttgcccgccttggcaagtacattctgtgctgcctgctgggtcacgccatccatgggctcctggtactgcccctcatctacttcctcttcacccgcaaaaacccctaccgcttcctgtggggcatcgtgacgccgctggccactgcctttgggacctcttccagttccgccacgctgccgctgatgatgaagtgcgtggaggagaataatggcgtggccaagcacatcagccgtttcatcctgcccatcggcgccaccgtcaacatggacggtgccgcgctcttccagtgcgtggccgcagtgttcattgcacagctcagccagcagtccttggacttcgtaaagatcatcaccatcctggtcacggccacagcgtccagcgtgggggcagcgggcatccctgctggaggtgtcctcactctggccatcatcctcgaagcagtcaacctcccggtcgaccatatctccttgatcctggctgtggactggctagtcgaccggtcctgtaccgtcctcaatgtagaaggtgacgctctgggggcaggactcctccaaaattatgtggaccgtacggagtcgagaagcacagagcctgagttgatacaagtgaagagtgagctgcccctggatccgctgccagtccccactgaggaaggaaaccccctcctcaaacactatcgggggcccgcaggggatgccacggtcgcctctgagaaggaatcagtcatgtaaaccccgggagggaccttccctgccctgctgggggtgctctttggacactggattatgaggaatggataaatggatgagctagggctctgggggtctgcctgcacactctggggagccaggggccccagcaccctccaggacaggagatctgggatgcctggctgctggagtacatgtgttcacaagggttactcctcaaaacccccagttctcactcatgtccccaactcaaggctagaaaacagcaagatggagaaataatgttctgctgcgtccccaccgtgacctgcctggcctcccctgtctcagggagcaggtcacaggtcaccatggggaattctagcccccactggggggatgttacaacaccatgctggttattttggcggctgtagttgtggggggatgtgtgtgtgcacgtgtgtgtgtgtgtgtgtgtgtgtgtgtgtgtgtgttctgtgacctcctgtccccatggtacgtcccaccctgtccccagatcccctattccctccacaataacagaaacactcccagggactctggggagaggctgaggacaaatacctgctgtcactccagaggacattttttttagcaataaaattgagtgtcaactatttaaaaaaaaaaaaaaaaa

SEQ ID NO: 308 - DNA, 2750 bp, Homo sapiens
ggctgccggggaggccagagcgtggagcgctgcgcggcgcggcggccgggccctcgagacggggacggacacaccagcccctcagataccacttggccactcccgctgaggccactcccactgcgtggctgaagcctcgaggtcaccaggcggaggcgcggagatgcccctgcatcagctgggggacaagccgctcaccttccccagccccaactcagccatggaaaacgggcttgaccacaccccacccagcaggagggcatccccgggcacacccctgagccccggctccctccgctccgctgcccatagccccctggacaccagcaagcagcccctctgccagctctgggccgagaagcatggcgcccgggggacccatgaggtgcggtacatctcggccgggcagagcgtggcgtgcggctggtgggccttcgcaccgccgtgcctgcaggtcctcaacacgcccaagggcatcctgttcttcctgtgtgcggccgcattcctgcaggggatgactgtgaatggcttcatcaacacagtcatcacctccctggagcgccgctatgacctgcacagctaccagagcgggctcatcgccagctcctacgacattgccgcctgcctctgcctcaccttcgtcagctacttcgggggctcagggcacaagccgcgctggctgggctggggcgtgctgcttatgggcacgggttcgctggtgttcgcgctgccccacttcacggctggccgctatgaggtggagttggacgcgggtgtcaggacgtgccctgccaaccccggcgcggtgtgtgcggacagcacctcgggcctgtcccgctaccagctggtcttcatgctgggccagttcctgcatggcgtgggtgccacacccctctacacgctgggcgtcacctacctggatgagaacgtcaagtccagctgctcgcccgtctacattgccatcttctacacagcggccatcctgggcccagctgccggctacctgattggaggtgccctgctgaatatctacacggaaatgggccgacggacggagctgaccaccgagagcccactgtgggtcggcgcctggtgggtcggcttcctgggctctggggccgctgctttcttcaccgccgttcccatccttggttaccctcggcagctgccaggctcccagcgctacgcggtcatgagagcggcggaaatgcaccagttgaaggacagcagccgtggggaggcgagcaacccggactttgggaaaaccatcagagacctgcctctctccatctggctcctgctgaagaaccccacgttcatcctgctctgcctggccggggccaccgaggccactctcatcaccggcatgtccacgttcagccccaagttcttggagtcccagttcagcctgagtgcctcagaagctgccaccttgtttgggtacctggtggtgccagcgggtggtggcggcaccttcctgggcggcttctttgtgaacaagctcaggctccggggctccgcggtcatcaagttctgcctgttctgcaccgttgtcagcctgctgggcatcctcgtcttctcactgcactgccccagtgtgcccatggcgggcgtcacagccagctacggcgggagcctcctgcccgaaggccacctgaacctaacggctccctgcaacgctgcctgcagctgccagccagaacactacagccctgtgtgcggctcggacggcctcatgtacttctcactgtgccacgcagggtgccctgcagccacggagacgaatgtggacggccagaaggtgtaccgagactgtagctgtatccctcagaatctttcctctggttttggccatgccactgcagggaaatgcacttcaacttgtcagagaaagcccctccttctggttttcatattcgttgtaattttctttacattcctcagcagcattcctgcactaacggcaactctacgatgtgtccgtgaccctcagagatcctttgccctgggaatccagtggattgtagttagaatactagggggcatcccggggcccatcgccttcggctgggtgatcgacaaggcctgtctgctgtggcaggaccagtgtggccagcagggctcctgcttggtgtaccagaattcggccatgagccgctacatactcatcatggggctcctgtacaaggtgctgggcgtcctcttctttgccatagcctgcttcttatacaagcccctgtcggagtcttcagatggcctggaaacttgtctgcccagccagtcctcagcccctgacagtgccacagatagccagctccagagcagcgtctgaccaccgcccgcgcccacccggccacggcgggcactcagcatttcctgatgacagaacagtgccgttgggtgatgcaatcacacgggaacttctatttgacctgcaaccttctacttaacctgtggtttaaagtcggctgtgacctcctgtccccagagctgtacggccctgcagtgggtgggaggaacttgcataaatatatatttatggacacacagtttgcatcagaacgtgtttatagaatgtgttttatacccgatcgtgtgtggtgtgcgtgaggacaaactccgcaggggctgtgaatcccactgggagggcggcgggcctgcagcccgaggaaggcttgtgtgtcctcagttaaaactgtgcatatcgaaatatattttgttatttaagcctgaaaaaaaaaaaaaaaaaa

SEQ ID NO: 309 - DNA, 3329 bp, Homo sapiens
cccacgcgtccgcggacgcgtgggtcgacccacgcgtccggccgctcggcccgggggcttcgggctgtcgggccggcgctcccttctctgccaggtggcgagtacacctgctcacgtaggcgtcatgaggtctccggttcgagacctggcccggaacgatggcgaggagagcacggaccgcacgcctcttctaccgggcgccccacgggccgaagccgctccagtgtgctgctctgctcgttacaacttagcaattttggccttttttggtttcttcattgtgtatgcattacgtgtgaatctgagtgttgcgttagtggatatggtagattcaaatacaactttagaagataatagaacttccaaggcatgtccagagcattctgctcccataaaagttcatcataatcaaacgggtaagaagtaccaatgggatgcagaaactcaaggatggattctcggttcctttttttatggctacatcatcacacagattcctggaggatatgttgccagcaaaataggggggaaaatgctgctaggatttgggatccttggcactgctgtcctcaccctgttcactcccattgctgcagatttaggagttggaccactcattgtactcagagcactagaaggactaggagagggtgttacatttccagccatgcatgccatgtggtcttcttgggctccccctcttgaaagaagcaaacttcttagcatttcatatgcaggagcacagcttgggacagtaatttctcttcctctttctggaataatttgctactatatgaattggacttatgtcttctacttttttggtactattggaatattttggtttcttttgtggatctggttagttagtgacacaccacaaaaacacaagagaatttcccattatgaaaaggaatacattctttcatcattaagaaatcagctttcttcacagaagtcagtgccgtgggtacccattttaaaatccctgccactttgggctatcgtagttgcacacttttcttacaactggactttttatactttattgacattattgcctacttatatgaaggagatcctaaggttcaatgttcaagagaatgggtttttatcttcattgccttatttaggctcttggttatgtatgatcctgtctggtcaagctgctgacaatttaagggcaaaatggaatttttcaactttatgtgttcgcagaatttttagccttataggaatgattggacctgcagtattcctggtagctgctggcttcattggctgtgattattctttggccgttgctttcctaactatatcaacaacactgggaggcttttgctcttctggatttagcatcaaccatctggatattgctccttcgtatgctggtatcctcctgggcatcacaaatacatttgccactattccaggaatggttgggcccgtcattgctaaaagtctgacccctgataacactgttggagaatggcaaaccgtgttctatattgctgctgctattaatgtttttggtgccattttctttacactattcgccaaaggtgaagtacaaaactgggctctcaatgatcaccatggacacagacactgaaggaaccaataaataatcctgcctctattaatgtatttttatttatcatgtaacctcaaagtgccttctgtattgtgtaagcattctatgtctttttttaattgtacttgtattagatttttaaggcctataatcatgaaatatcactagttgccagaataataaaatgaactgtgtttaattatgaataatatgtaagctaggacttctactttaggttcacatacctgcctgctagtcgggcaacatgaagtaggacagttctgttgattttttagggccatactaaagggaatgagctgaaacagacctcctgatacctttgcttaattaaactagatgataattctcaggtactgataaacacctgttgttgttcactttcctcataaaaattgtcagctctctctgacacttagacctcaaactttagcatctctgtggagctgccatccactgtataatttcgcctggcaactggactgaggggagtgtgcccaggcagctgccaagcactccctccctggcttcagggtcagagtgcccagcgtttatcagaggcagcatccaagcccagagccagtgtcgactcttcggctggtgcctttcctctgaggggctatcaatgtgtagataaagccctgagtaggcaagagcagtgagatccactgctatggtcttgatacatcctcaaactttcccttcccagcacagaggaatattggctggcatgcaacctgcaaaagaaaaatgcgaagcggccgggcacggtggctcatgcctgtagtcccagcactttggggggctgaggtgggcgaatcatgagatcaggagttcgagaccagcctggccagcatggtgaaaccccatctctactaaaaatacaaaaaattagctgggcgtggtgacgggcgcctgtaatcccagatactcaggaggctgaggtaggagaatcacttgaacctgggagatggaagttgcagtgaaccaagatcacgccactgcactccagcctgggcgatggagcgagactccaactcaaaaaaaaaaaaagaataaagaaagaaaagtgcgatgcccagtcaatcacaaataagatcatcctggtttaaatctactctcacatggatcacagtataaatttctatgtgctgtgttttgttcgtttgtattttgtagagatggggtctcgttttgtcgcccaggctggttttgaactcctggcttcaagcgatcctcctgtctcggcctcacaaagtgttgagactacaggcatgagccactgtgcccagcctgttctatgtttttaagctacacgagaattttttttttaattaattctcactgtttgttcagtctgtcttcatctaagtttgtgttgcagtttaaagttaaagtgacttttaaaggccacatcacctgagactagggtaatcatctttacttctggttcctgaaatcatatttttccagtggaccatcctccagtggctgtggttgttgagcatgctttcagaacacctatgtggcttaaaacttagtttatgttttgtgttcaacactacgtgtaatattttaaaactgtttaatgtgatgtgaatacatttatgtacatttatttttaaatttgtaaatagctttaaattgctatggcaatgtttcttttataaatcatcaaaataaacctttgtgaattgaaaaaaaaaaaaaaaaaaaa

SEQ ID NO: 310 - DNA, 506 bp, Homo sapiens
  misc_feature (13)..(13): "n" = a, t, g, or c.
  misc_feature (444)..(444): "n" = a, t, g, or c.
  misc_feature (450)..(450): "n" = a, t, g, or c.
  misc_feature (481)..(481): "n" = a, t, g, or c.
  misc_feature (486)..(486): "n" = a, t, g, or c.
tttcggcacagtnttccttctggcatcaactgaggtcacttagtgggacttaggtggcaaatgagctgctttggagggcccagtttggctttgctctccttgtcttatgtgttggtggtactggctagaagtttgggctcagagcaccatcatgtgacctctgcagtatggtggttttagaacagtcttgttacatggtatctggcttccactgaacaagcattactgaagaaccaggcaaaagcttcatggcctcttctaatctgaccttgaaagtcatacgggattactttcacattttttggcatacaaatgacccaaagcactagcccagattccagggagaggggatttagattccacctgttcgatggggaaattgcaaggtcacagtgtacaagagcctgtggggatgcagggcatctttgggaaaatattattctncccctngttttatttatgttaaaaagcttgaattaantaagncagggtgggtaaggaacaga

SEQ ID NO: 311 - DNA, 526 bp, Homo sapiens
atctctctcgggtggagtccttctgacagctggtgcgcctgcccgggaacatcctcctggactcaatcatggcttgtggtctggtcgccagcaacctgaatctcaaacctggagagtgccttcgagtgcgaggcgaggtggctcctgacgctaagagcttcgtgctgaacctgggcaaagacagcaacaacctgtgcctgcacttcaaccctcgcttcaacgcccacggcgacgccaacaccatcgtgtgcaacagcaaggacggcggggcctgggggaccgagcagcgggaggctgtctttcccttccagcctggaagtgttgcagaggtgtgcatcaccttcgaccaggccaacctgaccgtcaagctgccagatggatacgaattcaagttccccaaccgcctcaacctggaggccatcaactacatggcagctgacggtgacttcaagatcaaatgtgtggcctttgactgaaatcagccagcccatggcccccaataaaggcagctgcctctgctcccctg

SEQ ID NO: 312 - DNA, 3336 bp, Homo sapiens
ttttcttagacattaactgcagacggctggcaggatagaagcagcggctcacttggactttttcaccagggaaatcagagacaatgatggggctcttccccagaactacaggggctctggccatcttcgtggtggtcatattggttcatggagaattgcgaatagagactaaaggtcaatatgatgaagaagagatgactatgcaacaagctaaaagaaggcaaaaacgtgaatgggtgaaatttgccaaaccctgcagagaaggagaagataactcaaaaagaaacccaattgccaagattacttcagattaccaagcaacccagaaaatcacctaccgaatctctggagtgggaatcgatcagccgccttttggaatctttgttgttgacaaaaacactggagatattaacataacagctatagtcgaccgggaggaaactccaagcttcctgatcacatgtcgggctctaaatgcccaaggactagatgtagagaaaccacttatactaacggttaaaattttggatattaatgataatcctccagtattttcacaacaaattttcatgggtgaaattgaagaaaatagtgcctcaaactcactggtgatgatactaaatgccacagatgcagatgaaccaaaccacttgaattctaaaattgccttcaaaattgtctctcaggaaccagcaggcacacccatgttcctcctaagcagaaacactggggaagtccgtactttgaccaattctcttgaccgagagcaagctagcagctatcgtctggttgtgagtggtgcagacaaagatggagaaggactatcaactcaatgtgaatgtaatattaaagtgaaagatgtcaacgataacttcccaatgtttagagactctcagtattcagcacgtattgaagaaaatattttaagttctgaattacttcgatttcaagtaacagatttggatgaagagtacacagataattggcttgcagtatatttctttacctctgggaatgaaggaaattggtttgaaatacaaactgatcctagaactaatgaaggcatcctgaaagtggtgaaggctctagattatgaacaactacaaagcgtgaaacttagtattgctgtcaaaaacaaagctgaatttcaccaatcagttatctctcgataccgagttcagtcaaccccagtcacaattcaggtaataaatgtaagagaaggaattgcattccgtcctgcttccaagacatttactgtgcaaaaaggcataagtagcaaaaaattggtggattatatcctgggaacatatcaagccatcgatgaggacactaacaaagctgcctcaaatgtcaaatatgtcatgggacgtaacgatggtggatacctaatgattgattcaaaaactgctgaaatcaaatttgtcaaaaatatgaaccgagattctactttcatagttaacaaaacaatcacagctgaggttctggccatagatgaatacacgggtaaaacttctacaggcacggtatatgttagagtacccgatttcaatgacaattgtccaacagctgtcctcgaaaaagatgcagtttgcagttcttcaccttccgtggttgtctccgctagaacactgaataatagatacactggcccctatacatttgcactggaagatcaacctgtaaagttgcctgccgtatggagtatcacaaccctcaatgctacctcggccctcctcagagcccaggaacagatacctcctggagtataccacatctccctggtacttacagacagtcagaacaatcggtgtgagatgccacgcagcttgacactggaagtctgtcagtgtgacaacaggggcatctgtggaacttcttacccaaccacaagccctgggaccaggtatggcaggccgcactcagggaggctggggcctgccgccatcggcctgctgctccttggtctcctgctgctgctgttggccccccttctgctgttgacctgtgactgtggggcaggttctactgggggagtgacaggtggttttatcccagttcctgatggctcagaaggaacaattcatcagtggggaattgaaggagcccatcctgaagacaaggaaatcacaaatatttgtgtgcctcctgtaacagccaatggagccgatttcatggaaagttctgaagtttgtacaaatacgtatgccagaggcacagcggtggaaggcacttcaggaatggaaatgaccactaagcttggagcagccactgaatctggaggtgctgcaggctttgcaacagggacagtgtcaggagctgcttcaggattcggagcagccactggagttggcatctgttcctcagggcagtctggaaccatgagaacaaggcattccactggaggaaccaataaggactacgctgatggggcgataagcatgaattttctggactcctacttttctcagaaagcatttgcctgtgcggaggaagacgatggccaggaagcaaatgactgcttgttgatctatgataatgaaggcgcagatgccactggttctcctgtgggctccgtgggttgttgcagttttattgctgatgacctggatgacagcttcttggactcacttggacccaaatttaaaaaacttgcagagataagccttggtgttgatggtgaaggcaaagaagttcagccaccctctaaagacagcggttatgggattgaatcctgtggccatcccatagaagtccagcagacaggatttgttaagtgccagactttgtcaggaagtcaaggagcttctgctttgtccgcctctgggtctgtccagccagctgtttccatccctgaccctctgcagcatggtaactatttagtaacggagacttactcggcttctggttccctcgtgcaaccttccactgcaggctttgatccacttctcacacaaaatgtgatagtgacagaaagggtgatctgtcccatttccagtgttcctggcaacctagctggcccaacgcagctacgagggtcacatactatgctctgtacagaggatccttgctcccgtctaatatgaccagaatgagctggaataccacactgaccaaatctggatctttggactaaagtattcaaaatagcatagcaaagctcactgtattgggctaataatttggcacttattagcttctctcataaactgatcacgattataaattaaatgtttgggttcataccccaaaagcaatatgttgtcactcctaattctcaagtactattcaaattgtagtaaatcttaaagtttttcaaaaccctaaaatcatattcgc

SEQ ID NO: 313 - DNA, 7642 bp, Homo sapiens
cggaccctgcgcgcccccgtcccggctcccggccggctcgggggagaaggcgcccgaggggaggcgccggacagatcgcgtttcggaggcggcgcaggtgctgtaaactgcaaaccataatcctgtcttaatactgcaaacaaatcatagtggaactaaggggaacttaatttactgtttccaggttaactaaggtctcagctgtaaaccaaaagtgagaggagacattaagattttcattcttaccgggttgtcttcttcctgaagagcaatggagccgcttttacttggaagaggactaatcgtatatctaatgttcctcctgttaaaattctcaaaagcaattgaaataccatcttcagttcaacaggttccaacaatcataaaacagtcaaaagtccaagttgcctttcccttcgatgagtattttcaaattgaatgtgaagctaaaggaaatccagaaccaacattttcgtggactaaggatggcaaccctttttatttcactgaccatcggataattccatcgaacaattcaggaacattcaggatcccaaacgaggggcacatatctcactttcaagggaaataccgctgctttgcttcaaataaactgggaatcgctatgtcagaagaaatagaatttatagttccaagtgttccaaaattcccaaaagaaaaaattgaccctcttgaagtggaggagggagatccaattgtcctcccatgcaatcctcccaaaggcctcccacctttacacatttattggatgaatattgaattagaacacatcgaacaagatgaaagagtatacatgagccaaaagggagatctatacttcgcaaacgtggaagaaaaggacagtcgcaatgactactgttgctttgctgcatttccaagattaaggactattgtacagaaaatgccaatgaaactaacagttaacagtttaaagcatgctaatgactcaagttcatccacagaaattggttccaaggcaaattccatcaagcaaagaaaacccaaactgctgttgcctcccactgagagtggcagtgagtcttcaattaccatcctcaaaggggaaatcttgctgcttgagtgttttgctgaaggcttgccaactccacaggttgattggaacaaaattggtggtgacttaccaaaggggagagaagcaaaagaaaattatggcaagactttgaagatagagaatgtctcctaccaggacaaaggaaattatcgctgcacagccagcaatttcttgggaacagccactcacgattttcacgttatagtagaagagcctcctcgctggacaaagaagcctcagagtgctgtgtatagcaccggaagcaatggcatcttgttatgtgaggctgaaggagaacctcaacccacaatcaagtggagagtcaatggctccccagttgacaatcatccatttgctggtgatgttgtcttccccagggaaatcagttttaccaaccttcaaccaaatcatactgctgtgtaccagtgtgaagcctcaaatgtccatggaactatccttgccaatgccaatattgatgttgtggatgtccgtccattgatacaaaccaaagatggagaaaattacgctacagtggttgggtacagtgctttcttacattgcgagttctttgcttcacctgaggcagtcgtgtcctggcagaaggtggaagaagtgaaacccctggagggcaggcggtatcatatctatgaaaatggcacattgcagatcaacagaaccaccgaagaagatgctgggtcttactcatgttgggtagaaaatgctataggaaaaactgcagtcacagccaatttggatattagaaatgctacaaaacttagagtttctcctaagaatcctcgtatccccaaattgcatatgcttgaattacattgtgaaagcaaatgtgactcacatttgaaacacagtttgaagttgtcctggagtaaagatggagaagcctttgaaattaatggcacagaagatggcaggataattattgatggagctaatttgaccatatctaatgtaactttagaggaccaaggtatttactgctgttcagctcatactgctctagacagtgctgccgatataactcaagtaactgttcttgatgttccggatccaccagaaaaccttcacttgtctgaaagacagaacaggagtgttcggctgacctgggaagctggagctgaccacaacagcaatattagcgagtatattgttgaatttgaaggaaacaaagaagagcctggaaggtgggaggaactgaccagagtccaaggaaagaaaaccacagttatcttacctttggctccatttgtgagataccagttcagggtcatagccgtgaacgaagtagggagaagtcagcctagccagccgtcagaccatcatgaaacaccaccagcagctccagataggaatccacaaaacataagggttcaagcctctcaacccaaggaaatgattataaagtgggagcctttgaaatccatggagcagaatggaccaggcctagagtacagagtgacctggaagccacagggagccccagtggagtgggaagaagaaacagtcacaaaccacacattgcgggtgatgacgcctgctgtctatgccccttatgatgtcaaggtccaggctatcaatcaactaggatctgggcctgaccctcagtcagtgactctctattctggagaagactatcctgatacagctccagtgatccatggggtggacgttataaacagtacattagttaaagttacctggtcaacagttccaaaggacagagtacatggacgtctgaaaggctatcagataaattggtggaaaacaaaaagtctgttggatggaagaacacatcccaaagaagtgaacattctaagattttcaggacaaagaaactctggaatggttccttccttagatgcctttagtgaatttcatttaacagtcttagcctataactctaaaggagctggtcctgaaagtgagccttatatatttcaaacaccagaaggagtacctgaacagccaacttttctaaaggtcatcaaagttgataaagacactgccactttatcttggggactacctaagaaattaaatggaaacttaactggctatcttttgcaatatcagataataaatgacacctacgagattggagaattaaatgatattaacattacaactccatcaaagcccagctggcacctctcaaacctgaatgcaactaccaagtacaaattctacttgagggcttgcacttcacagggctgtggaaaaccgatcacggaggaaagctccaccttaggagaagggagtaaaggtatcgggaagatatcaggagtaaatcttactcaaaagactcacccagtagaggtatttgagccgggagctgaacatatagttcgcctaatgactaagaattggggcgataacgatagcatttttcaagatgtaattgagacaagagggagagaatatgctggtttatatgatgacatctccactcaaggctggtttattggactgatgtgtgcgattgctcttctcacactactattattaactgtttgctttgtgaagaggaatagaggtggaaagtactcagttaaagaaaaggaagatttgcatccagacccagaaattcagtcagtaaaagatgaaacctttggtgaatacagtgacagtgatgaaaagcctctcaaaggaagccttcggtcccttaatagggatatgcagcctactgaaagtgctgacagcttagtcgaatacggagagggagaccatggtctcttcagtgaagatggatcatttattggtgcctacgctggatctaaggagaagggatctgttgaaagcaatggaagttctacagcaacttttccccttcgggcataaacacaacatatgtaagcaacgctactggttcaccccaaccttccatatttatctgttcaaaggagcaagaactttcatataggaatagaaacatgctggccgaagatttcatccagaagtcaacatcctgcaattatgttgaaaagagtagtactttcttcaaaatataaaatgccaagcacttcaggcctatgttttgcttatattgttttcaggtgctcaaaatgcaaaacacaaaacaaatcctgcatttagatacacctcaactaaatccaaagtccccattcagtatattccatatttgcctgattttactattcggtgtgtttgcatagatgttgctacttggtgggtttttctccgtatgcacattggtatacagtctctgagaactggcttggtgactttgcttcactacaggttaaaagaccataagcaaactggttatttaaaatgtaaaaaggaatatgaaagtcttattaaaacacttcattgaaaatatacagtctaaatttattatttaaattttactagcaaaagtcttaggtgaacaatcaactagtatttgttgagctcctatttgcccagagatggtcatatttaaacagaagtatacgtttttcagtttcaacatgaatttttttatttctgtcagttatgacatccacgagcatcactttttgtgtctgtttttttttttttcttggactaaattcaactgcatggaagcggtggtcagaaggttgttttatacgagaacaggcagaaagtgcccattgttcaggattctaatagctacatctacttaatatcttcatttctaaattgactgcttttacctttttctcatgtttatataatggtatgcttgcatatatttcatgaatacattgtacatattatgttaatatttacacaatttaaaatatagatgtgttttattttgaagtgagaaaatgaacattaacaggcatgtttgtacagctagaatatattagtaagatactgtttttcgtcattccagagctacaactaataacacgaggttccaaagctgaagactttgtataaagtatttgggttttgttcttgtattgctttctttcaacagtttcaaaataaaatatcatacaaatattgagggaaatgttttcatatttttcaaaataggtttttattgttgaatgtacatctaccccagcccctcaaaagaaaaactgtttacatagaaattcctacacatacgtttgcgtatatgttattttaaacatctttgtggtgagaattttttccccgatattctccttctgtcaaagtcagaacaaattcagggaatttattttctggcagttgtgctccagtccttttaaaattgtacatgaacatgttttagaaacaatatggaggatgatgcatacatgtcggtcaagttcagcgctcgacattttatggaaagatttttttaaccttaccacgaaatacttaactactgtttaagtgaattgacttatttcactttagtttttgaactgtgattattggtatactgttatatcctcaacttggatttatggtaaccccttttagttcatggagaccaaaatttggggtatttataatagtcagcgcaggaatgcacatggaatatctacttgtccttttgaacctcacgagtcatccagaatgtatagacaggaaaagcatgtcttatttaaaactgtaatttatgggctcaggatctgaccgcagtcccgggagtaagcatttcaaagggggaaggcagtgtggtccctaccctgtgtgaatgtgaggatgtagacatccatcagtgcaactcgagctccatcctcctccgatttctaaggttccagttttctggagggacagtcatcatgttttgatttatctgggagaaaactgtggtgcacagcttgtgaggagggcaaggttgtgacgttcgagcttagttctggtgttattctgtctcctcttctttgtcatcagccaaaacgtggtttttaaagagagtcatgcaggttagaaataatgtcaaaaatatttaggaatttaataacctttaagtcagaaactaaaacaaatactgaaatattagctcttcctacacttcgtgttcccctttagctgcctgaaaatcaagattgctcctactcagatcttctgagtggctaaaacttatggatatgaaaaatgagattgaatgatgactatgctttgctatcattgttacctttcctcaatactatttggcaactactgggactcttcagcacaaaaggaatagatctatgattgaccctgattttaattgtgaaattatatgattcatatattttatgaatcagaataaccttcaaataaaataaatctaagtcggttaaaatggatttcatgattttccctcagaaaatgagtaacggagtcccacggcgtgcaatggtaattataaattggtgatgcttgtttgcaaattgcccactcgtgataagtcaacagccaatatttaaaactttgttcgttactggctttaccctaactttctctagtctactgtcaatatcattttaatgtaattgattgtatatagtctcaagaatggttggtgggcatgagttcctagagaactgtccaagggttgggaaaatccaaattctcttcctggctccagcactgattttgtacataaacattaggcaggttgcttaacctttttatttcaaactctctcaactctaaagtgctaataataatctcagttaccttatctttgtcacagggtgttcttttttatgaagaaaaatttgaaaatgataaaagctaagatgccttctaacttcataagcaaacctttaactaattatgtatctgaaagtcacccccacataccaactcaacttttttcctgtgaacacataaatatatttttatagaaaaacaaatctacataaaataaatctactgtttagtgagcagtatgacttgtacatgccattgaaaattattaatcagaagaaaattaagcagggtctttgctatacaaaagtgttttccactaattttgcatgcgtatttataagaaaaatgtgaatttggtggttttattctatcggtataaaggcatcgatattttagatgcacccgtgtttgtaaaaatgtagagcacaatggaattatgctggaagtctcaaataatatttttttcctattttatactcatggaagagataagctaaagaggggacaataatgagaaatgttggtgtgcttttctaagcatttaaaacataattgccaattgaaaccctaaatatgtttacataccattaagatatgattcatgtaacaatgttaaattaattataatgggattgggtttgttatctgtggtagtatatatcctagtgttcctatagtgaaataagtagggttcagccaaagctttctttgttttgtaccttaaattgttcgattacgtcatcaaaagagatgaaaggtatgtagaacaggttcacgtgattacctttttcttttggcttggattaatattcatagtagaactttataaaacgtgtttgtattgtaggtggtgtttgtattatgcttatgactatgtatggtttgaaaatattttcattatacatgaaattcaactttccaaataaaagttctacttcatgt

SEQ ID NO: 314 - DNA, 735 bp, Homo sapiens
cgacatcagagatgaggacagcattgctgctccttgcagccctggctgtggctacagggccagcccttaccctgcgctgccacgtgtgcaccagctccagcaactgcaagcattctgtggtctgcccggccagctctcgcttctgcaagaccacgaacacagtggagcctctgagggggaatctggtgaagaaggactgtgcggagtcgtgcacacccagctacaccctgcaaggccaggtcagcagcggcaccagctccacccagtgctgccaggaggacctgtgcaatgagaagctgcacaacgctgcacccacccgcaccgccctcgcccacagtgccctcagcctggggctggccctgagcctcctggccgtcatcttagcccccagcctgtgaccttccccccagggaaggcccctcatgcctttccttccctttctctggggattccacacctctcttccccagccggcaacgggggtgccaggagccccaggctgagggcttccccgaaagtctgggaccaggtccaggtgggcatggaatgctgatgacttggagcaggccccacagaccccacagaggatgaagccaccccacagaggatgcagcccccagctgcatggaaggtggaggacagaagccctgtggatccccggatttcacactccttctgttttgttgccgtttattttgtactcaaatctctacatggagataaatgatttaaacc

SEQ ID NO: 315 - DNA, 11185 bp, Homo sapiens
gctgccccgagcctttctggggaagaactccaggcgtgcggacgcaacagccgagaacattaggtgttgtggacaggagctgggaccaagatcttcggccagccccgcatcctcccgcatcttccagcaccgtcccgcaccctccgcatccttccccgggccaccacgcttcctatgtgacccgcctgggcaacgccgaacccagtcgcgcagcgctgcagtgaattttccccccaaactgcaataagccgccttccaaggccaagatgttcataaatataaagagcatcttatggatgtgttcaaccttaatagtaacccatgcgctacataaagtcaaagtgggaaaaagcccaccggtgaggggctccctctctggaaaagtcagcctaccttgtcatttttcaacgatgcctactttgccacccagttacaacaccagtgaatttctccgcatcaaatggtctaagattgaagtggacaaaaatggaaaagatttgaaagagactactgtccttgtggcccaaaatggaaatatcaagattggtcaggactacaaagggagagtgtctgtgcccacacatcccgaggctgtgggcgatgcctccctcactgtggtcaagctgctggcaagtgatgcgggtctttaccgctgtgacgtcatgtacgggattgaagacacacaagacacggtgtcactgactgtggatggggttgtgtttcactacagggcggcaaccagcaggtacacactgaattttgaggctgctcagaaggcttgtttggacgttggggcagtcatagcaactccagagcagctctttgctgcctatgaagatggatttgagcagtgtgacgcaggctggctggctgatcagactgtcagatatcccatccgggctcccagagtaggctgttatggagataagatgggaaaggcaggagtcaggacttatggattccgttctccccaggaaacttacgatgtgtattgttatgtggatcatctggatggtgatgtgttccacctcactgtccccagtaaattcaccttcgaggaggctgcaaaagagtgtgaaaaccaggatgccaggctggcaacagtgggggaactccaggcggcatggaggaacggctttgaccagtgcgattacgggtggctgtcggatgccagcgtgcgccaccctgtgactgtggccagggcccagtgtggaggtggtctacttggggtgagaaccctgtatcgttttgagaaccagacaggcttccctccccctgatagcagatttgatgcctactgctttaaacctaaagaggctacaaccatcgatttgagtatcctcgcagaaactgcatcacccagtttatccaaagaaccacaaatggtttctgatagaactacaccaatcatccctttagttgatgaattacctgtcattccaacagagttccctcccgtgggaaatattgtcagttttgaacagaaagccacagtccaacctcaggctatcacagatagtttagccaccaaattacccacacctactggcagtaccaagaagccctgggatatggatgactactcaccttctgcttcaggacctcttggaaagctagacatatcagaaattaaggaagaagtgctccagagtacaactggcgtctctcattatgctacggattcatgggatggtgtcgtggaagataaacaaacacaagaatcggttacacagattgaacaaatagaagtgggtcctttggtaacatctatggaaatcttaaagcacattccttccaaggaattccctgtaactgaaacaccattggtaactgcaagaatgatcctggaatccaaaactgaaaagaaaatggtaagcactgtttctgaattggtaaccacaggtcactatggattcaccttgggagaagaggatgatgaagacagaacacttacagttggatctgatgagagcaccttgatctttgaccaaattcctgaagtcattacggtgtcaaagacttcagaagacaccatccacactcatttagaagacttggagtcagtctcagcatccacaactgtttcccctttaattatgcctgataataatggatcatccatggatgactgggaagagagacaaactagtggtaggataacggaagagtttcttggcaaatatctgtctactacaccttttccatcacagcatcgtacagaaatagaattgtttccttattctggtgataaaatattagtagagggaatttccacagttatttatccttctctacaaacagaaatgacacatagaagagaaagaacagaaacactaataccagagatgagaacagatacttatacagatgaaatacaagaagagatcactaaaagtccatttatgggaaaaacagaagaagaagtcttctctgggatgaaactctctacatctctctcagagccaattcatgttacagagtcttctgtggaaatgaccaagtcttttgatttcccaacattgataacaaagttaagtgcagagccaacagaagtaagagatatggaggaagactttacagcaactccaggtactacaaaatatgatgaaaatattacaacagtgcttttggcccatggtactttaagtgttgaagcagccactgtatcaaaatggtcatgggatgaagataatacaacatccaagcctttagagtctacagaaccttcagcctcttcaaaattgccccctgccttactcacaactgtggggatgaatggaaaggataaagacatcccaagtttcactgaagatggagcagatgaatttactcttattccagatagtactcaaaagcagttagaggaggttactgatgaagacatagcagcccatggaaaattcacaattagatttcagccaactacatcaactggtattgcagaaaagtcaactttgagagattctacaactgaagaaaaagttccacctatcacaagcactgaaggccaagtttatgcaaccatggaaggaagtgctttgggtgaagtagaagatgtggacctctctaagccagtatctactgttccccaatttgcacacacttcagaggtggaaggattagcatttgttagttatagtagcacccaagagcctactacttatgtagactcttcccataccattcctctttctgtaattcccaagacagactggggagtgttagtaccttctgttccatcagaagatgaagttctaggtgaaccctctcaagacatacttgtcattgatcagactcgccttgaagcgactatttctccagaaactatgagaacaacaaaaatcacagagggaacaactcaggaagaattcccttggaaagaacagactgcagagaaaccagttcctgctctcagttctacagcttggactcccaaggaggcagtaacaccactggatgaacaagagggcgatggatcagcatatacagtctctgaagatgaattgttgacaggttctgagagggtcccagttttagaaacaactccagttggaaaaattgatcacagtgtgtcttatccaccaggtgctgtaactgagcacaaagtgaaaacagatgaagtggtaacactaacaccacgcattgggccaaaagtatctttaagtccagggcctgaacaaaaatatgaaacagaaggtagtagtacaacaggatttacatcatctttgagtccttttagtacccacattacccagcttatggaagaaaccactactgagaaaacatccctagaggatattgatttaggctcaggattatttgaaaagcccaaagccacagaactcatagaattttcaacaatcaaagtcacagttccaagtgatattaccactgccttcagttcagtagacagacttcacacaacttcagcattcaagccatcttccgcgatcactaagaaaccacctctcatcgacagggaacctggtgaagaaacaaccagtgacatggtaatcattggagaatcaacatctcatgttcctcccactacccttgaagatattgtagccaaggaaacagaaaccgatattgatagagagtatttcacgacttcaagtcctcctgctacacagccaacaagaccacccactgtggaagacaaagaggcctttggacctcaggcgctttctacgccacagcccccagcaagcacaaaatttcaccctgacattaatgtttatattattgaggtcagagaaaataagacaggtcgaatgagtgatttgagtgtaattggtcatccaatagattcagaatctaaagaagatgaaccttgtagtgaagaaacagatccagtgcatgatctaatggctgaaattttacctgaattccctgacataattgaaatagacctataccacagtgaagaaaatgaagaagaagaagaagagtgtgcaaatgctactgatgtgacaaccaccccatctgtgcagtacataaatgggaagcatctcgttaccactgtgcccaaggacccagaagctgcagaagctaggcgtggccagtttgaaagtgttgcaccttctcagaatttctcggacagctctgaaagtgatactcatccatttgtaatagccaaaacggaattgtctactgctgtgcaacctaatgaatctacagaaacaactgagtctcttgaagttacatggaagcctgagacttaccctgaaacatcagaacatttttcaggtggtgagcctgatgttttccccacagtcccattccatgaggaatttgaaagtggaacagccaaaaaaggggcagaatcagtcacagagagagatactgaagttggtcatcaggcacatgaacatactgaacctgtatctctgtttcctgaagagtcttcaggagagattgccattgaccaagaatctcagaaaatagcctttgcaagggctacagaagtaacatttggtgaagaggtagaaaaaagtacttctgtcacatacactcccactatagttccaagttctgcatcagcatatgtttcagaggaagaagcagttaccctaataggaaatccttggccagatgacctgttgtctaccaaagaaagctgggtagaagcaactcctagacaagttgtagagctctcagggagttcttcgattccaattacagaaggctctggagaagcagaagaagatgaagatacaatgttcaccatggtaactgatttatcacagagaaatactactgatacactcattactttagacactagcaggataatcacagaaagcttttttgaggttcctgcaaccaccatttatccagtttctgaacaaccttctgcaaaagtggtgcctaccaagtttgtaagtgaaacagacacttctgagtggatttccagtaccactgttgaggaaaagaaaaggaaggaggaggagggaactacaggtacggcttctacatttgaggtatattcatctacacagagatcggatcaattaattttaccctttgaattagaaagtccaaatgtagctacatctagtgattcaggtaccaggaaaagttttatgtccttgacaacaccaacacagtctgaaagggaaatgacagattctactcctgtctttacagaaacaaatacattagaaaatttgggggcacagaccactgagcacagcagtatccatcaacctggggttcaggaagggctgaccactctcccacgtagtcctgcctctgtctttatggagcagggctctggagaagctgctgccgacccagaaaccaccactgtttcttcattttcattaaacgtagagtatgcaattcaagccgaaaaggaagtagctggcactttgtctccgcatgtggaaactacattctccactgagccaacaggactggttttgagtacagtaatggacagagtagttgctgaaaatataacccaaacatccagggaaatagtgatttcagagcgattaggagaaccaaattatggggcagaaataaggggcttttccacaggttttcctttggaggaagatttcagtggtgactttagagaatactcaacagtgtctcatcccatagcaaaagaagaaacggtaatgatggaaggctctggagatgcagcatttagggacacccagacttcaccatctacagtacctacttcagttcacatcagtcacatatctgactcagaaggacccagtagcaccatggtcagcacttcagccttcccctgggaagagtttacatcctcagctgagggctcaggtgagcaactggtcacagtcagcagctctgttgttccagtgcttcccagtgctgtgcaaaagttttctggtacagcttcctccattatcgacgaaggattgggagaagtgggtactgtcaatgaaattgatagaagatccaccattttaccaacagcagaagtggaaggtacgaaagctccagtagagaaggaggaagtaaaggtcagtggcacagtttcaacaaactttccccaaactatagagccagccaaattatggtctaggcaagaagtcaaccctgtaagacaagaaattgaaagtgaaacaacatcagaggaacaaattcaagaagaaaagtcatttgaatcccctcaaaactctcctgcaacagaacaaacaatctttgattcacagacatttactgaaactgaactcaaaaccacagattattctgtactaacaacaaagaaaacttacagtgatgataaagaaatgaaggaggaagacacttctttagttaacatgtctactccagatccagatgcaaatggcttggaatcttacacaactctccctgaagctactgaaaagtcacattttttcttagctactgcattagtaactgaatctataccagctgaacatgtagtcacagattcaccaatcaaaaaggaagaaagtacaaaacattttccgaaaggcatgagaccaacaattcaagagtcagatactgagctcttattctctggactgggatcaggagaagaagttttacctactctaccaacagagtcagtgaattttactgaagtggaacaaatcaataacacattatatccccacacttctcaagtggaaagtacctcaagtgacaaaattgaagactttaacagaatggaaaatgtggcaaaagaagttggaccactcgtatctcaaacagacatctttgaaggtagtgggtcagtaaccagcacaacattaatagaaattttaagtgacactggagcagaaggacccacggtggcacctctccctttctccacggacatcggacatcctcaaaatcagactgtcaggtgggcagaagaaatccagactagtagaccacaaaccataactgaacaagactctaacaagaattcttcaacagcagaaattaacgaaacaacaacctcatctactgattttctggctagagcttatggttttgaaatggccaaagaatttgttacatcagcaccaaaaccatctgacttgtattatgaaccttctggagaaggatctggagaagtggatattgttgattcatttcacacttctgcaactactcaggcaaccagacaagaaagcagcaccacatttgtttctgatgggtccctggaaaaacatcctgaggtgccaagcgctaaagctgttactgctgatggattcccaacagtttcagtgatgctgcctcttcattcagagcagaacaaaagctcccctgatccaactagcacactgtcaaatacagtgtcatatgagaggtccacagacggtagtttccaagaccgtttcagggaattcgaggattccaccttaaaacctaacagaaaaaaacccactgaaaatattatcatagacctggacaaagaggacaaggatttaatattgacaattacagagagtaccatccttgaaattctacctgagctgacatcggataaaaatactatcatagatattgatcatactaaacctgtgtatgaagacattcttggaatgcaaacagatatagatacagaggtaccatcagaaccacatgacagtaatgatgaaagtaatgatgacagcactcaagttcaagagatctatgaggcagctgtcaacctttctttaactgaggaaacatttgagggctctgctgatgttctggctagctacactcaggcaacacatgatgaatcaatgacttatgaagatagaagccaactagatcacatgggctttcacttcacaactgggatccctgctcctagcacagaaacagaattagacgttttacttcccacggcaacatccctgccaattcctcgtaagtctgccacagttattccagagattgaaggaataaaagctgaagcaaaagccctggatgacatgtttgaatcaagcactttgtctgatggtcaagctattgcagaccaaagtgaaataataccaacattgggccaatttgaaaggactcaggaggagtatgaagacaaaaaacatgctggtccttcttttcagccagaattctcttcaggagctgaggaggcattagtagaccatactccctatctaagtattgctactacccaccttatggatcagagtgtaacagaggtgcctgatgtgatggaaggatccaatcccccatattacactgatacaacattagcagtttcaacatttgcgaagttgtcttctcagacaccatcatctcccctcactatctactcaggcagtgaagcctctggacacacagagatcccccagcccagtgctctgccaggaatagacgtcggctcatctgtaatgtccccacaggattcttttaaggaaattcatgtaaatattgaagcaactttcaaaccatcaagtgaggaataccttcacataactgagcctccctctttatctcctgacacaaaattagaaccttcagaagatgatggtaaacctgagttattagaagaaatggaagcttctcccacagaacttattgctgtggaaggaactgagattctccaagatttccaaaacaaaaccgatggtcaagtttctggagaagcaatcaagatgtttcccaccattaaaacacctgaggctggaactgttattacaactgccgatgaaattgaattagaaggtgctacacagtggccacactctacttctgcttctgccacctatggggtcgaggcaggtgtggtgccttggctaagtccacagacttctgagaggcccacgctttcttcttctccagaaataaaccctgaaactcaagcagctttaatcagagggcaggattccacgatagcagcatcagaacagcaagtggcagcgagaattcttgattccaatgatcaggcaacagtaaaccctgtggaatttaatactgaggttgcaacaccaccattttcccttctggagacttctaatgaaacagatttcctgattggcattaatgaagagtcagtggaaggcacggcaatctatttaccaggacctgatcgctgcaaaatgaacccgtgccttaacggaggcacctgttatcctactgaaacttcctacgtatgcacctgtgtgccaggatacagcggagaccagtgtgaacttgattttgatgaatgtcactctaatccctgtcgtaatggagccacttgtgttgatggttttaacacattcaggtgcctctgccttccaagttatgttggtgcactttgtgagcaagataccgagacatgtgactatggctggcacaaattccaagggcagtgctacaaatactttgcccatcgacgcacatgggatgcagctgaacgggaatgccgtctgcagggtgcccatctcacaagcatcctgtctcacgaagaacaaatgtttgttaatcgtgtgggccatgattatcagtggataggcctcaatgacaagatgtttgagcatgacttccgttggactgatggcagcacactgcaatacgagaattggagacccaaccagccagacagcttcttttctgctggagaagactgtgttgtaatcatttggcatgagaatggccagtggaatgatgttccctgcaattaccatctcacctatacgtgcaagaaaggaacagttgcttgcggccagccccctgttgtagaaaatgccaagacctttggaaagatgaaacctcgttatgaaatcaactccctgattagataccactgcaaagatggtttcattcaacgtcaccttccaactatccggtgcttaggaaatggaagatgggctatacctaaaattacctgcatgaacccatctgcataccaaaggacttattctatgaaatactttaaaaattcctcatcagcaaaggacaattcaataaatacatccaaacatgatcatcgttggagccggaggtggcaggagtcgaggcgctgatccctaaaatggcgaacatgtgttttcatcatttcagccaaagtcctaacttcctgtgcctttcctatcacctcgagaagtaattatcagttggtttggatttttggaccaccgttcagtcattttgggttgccgtgctcccaaaacattttaaatgaaagtattggcattcaaaaagacagcagacaaaatgaaagaaaatgagagcagaaagtaagcatttccagcctatctaatttctttagttttctatttgcctccagtgcagtccatttcctaatgtataccagcctactgtactatttaaaatgctcaatttcagcaccgatggccatgtaaataagatgatttaatgttgattttaatcctgtatataaaataaaaagtcacaatgagtttgggcatatttaatgatgattatggagccttagaggtctttaatcattggttcggctgcttttatgtagtttaggctggaaatggtttcacttgctctttgactgtcagcaagactgaagatggcttttcctggacagctagaaaacacaaaatcttgtaggtcattgcacctatctcagccataggtgcagtttgcttctacatgatgctaaaggctgcgaatgggatcctgatggaactaaggactccaatgtcgaactcttctttgctgcattcctttttcttcacttacaagaaaggcctgaatggaggacttttctgtaaccagg

SEQ ID NO: 316 - DNA, 2484 bp, Homo sapiens
ggcacgaggaagggcctgtgggtttattataaggcggagctcggcgggagaggtgcgggccgaatccgagccgagcggagaggaatccggcagtagagagcggactccagccggcggaccctgcagccctcgcctgggacagcggcgcgctgggcaggcgcccaagagagcatcgagcagcggaacccgcgaagccggcccgcagccgcgacccgcgcagcctgccgctctcccgccgccggtccgggcagcatgaggcgcgcggcgctctggctctggctgtgcgcgctggcgctgagcctgcagccggccctgccgcaaattgtggctactaatttgccccctgaagatcaagatggctctggggatgactctgacaacttctccggctcaggtgcaggtgctttgcaagatatcaccttgtcacagcagaccccctccacttggaaggacacgcagctcctgacggctattcccacgtctccagaacccaccggcctggaggctacagctgcctccacctccaccctgccggctggagaggggcccaaggagggagaggctgtagtcctgccagaagtggagcctggcctcaccgcccgggagcaggaggccaccccccgacccagggagaccacacagctcccgaccactcatcaggcctcaacgaccacagccaccacggcccaggagcccgccacctcccacccccacagggacatgcagcctggccaccatgagacctcaacccctgcaggacccagccaagctgaccttcacactccccacacagaggatggaggtccttctgccaccgagagggctgctgaggatggagcctccagtcagctcccagcagcagagggctctggggagcaggacttcacctttgaaacctcgggggagaatacggctgtagtggccgtggagcctgaccgccggaaccagtccccagtggatcagggggccacgggggcctcacagggcctcctggacaggaaagaggtgctgggaggggtcattgccgtaggcctcgtggggctcatctttgctgtgtgcctggtgggtttcatgctgtaccgcatgaagaagaaggacgaaggcagctactccttggaggagccgaaacaagccaacggcggggcctaccagaagcccaccaaacaggaggaattctatgcctgacgcgggagccatgcgccccctccgccctgccactcactaggcccccacttgcctcttccttgaagaactgcaggccctggcctcccctgccaccaggccacctccccagcattccagcccctctggtcgctcctgcccacggagtcgtggggtgtgctgggagctccactctgcttctctgacttctgcctggagacttagggcaccaggggtttctcgcataggacctttccaccacagccagcacctggcatcgcaccattctgactcggtttctccaaactgaagcagcctctccccaggtccagctctggaggggagggggatccgactgctttggacctaaatggcctcatgtggctggaagatcctgcgggtggggcttggggctcacacacctgtagcacttactggtaggaccaagcatcttgggggggtggccgctgagtggcaggggacaggagtccactttgtttcgtggggaggtctaatctagatatcgacttgtttttgcacatgtttcctctagttctttgttcatagcccagtagaccttgttacttctgaggtaagttaagtaagttgattcggtatccccccatcttgcttccctaatctatggtcgggagacagcatcagggttaagaagactttttttttttttttttttaaactaggagaaccaaatctggaagccaaaatgtaggcttagtttgtgtgttgtctcttgagtttgtcgctcatgtgtgcaacagggtatggactatctgtctggtggccccgtttctggtggtctgttggcaggctggccagtccaggctgccgtggggccgccgcctctttcaagcagtcgtgcctgtgtccatgcgctcagggccatgctgaggcctgggccgctgccacgttggagaagcccgtgtgagaagtgaatgctgggactcagccttcagacagagaggactgtagggagggcggcaggggcctggagatcctcctgcagaccacgcccgtcctgcctgtggcgccgtctccaggggctgcttcctcctggaaattgacgaggggtgtcttgggcagagctggctctgagcgcctccatccaaggccaggttctccgttagctcctgtggccccaccctgggccctgggctggaatcaggaatattttccaaagagtgatagtcttttgcttttggcaaaactctacttaatccaatgggtttttccctgtacagtagattttccaaatgtaataaactttaatataaagtaaaaaaaaaaaaaaaaaaaaaaaaaaaa

SEQ ID NO: 317 - DNA, 934 bp, Homo sapiens
gagcgagcgcgctgcagcgcgcgcatggctagcacggcttcggagatcatcgccttcatggtctccatctcaggctgggtactggtgtcctccacgctgcccaccgactactggaaggtgtctaccatcgacggcacggtcatcacaaccgccacctattgggccaacctgtggaaggcgtgcgttaccgactccacgggcgtctccaactgcaaggacttcccctccatgctggcgctggacggttatatacaggcatgtagaggacttatgatcgctgctgtcagcctgggcttctttggttccatatttgcgctctttggaatgaagtgtaccaaagtcggaggctccgataaagccaaagctaaaattgcttgtttggctgggattgtattcatactgtcagggctgtgctcaatgactggatgttccctatatgcaaacaaaatcacaacggaattctttgatcctctctttgttgagcaaaagtatgaattaggagccgctctgtttattggatgggcaggagcctcactgtgcataattggtggtgtcatattttgcttttcaatatctgacaacaacaaaacacccagatacacatacaacggggccacatctgtcatgtcttctcggacaaagtatcatggtggagaagattttaaaacaacaaacccttcaaaacagtttgataaaaatgcttatgtctaaaagagctcgctggcaagctgcctcttgagtttgttataaaagcgaactgttcacaaaatgatcccatcaaggccctcccataattaacactcaaaactatttttaaaatatgcatttgaagcatctgttgattgtatggatgtaagtgttcttacatagttagttatatactaatcattttctgttgtggctttctataaaaaataaacagtttatttacagg

SEQ ID NO: 318 - DNA, 3310 bp, Homo sapiens
ggcacgagggcactgagctctgccgcctggctctagccgcctgcctggcccccgccgggactcttgcccaccctcagccatggctccgatatctctgtcgtggctgctccgcttggccaccttctgccatctgactgtcctgctggctggacagcaccacggtgtgacgaaatgcaacatcacgtgcagcaagatgacatcaaagatacctgtagctttgctcatccactatcaacagaaccaggcatcatgcggcaaacgcgcaatcatcttggagacgagacagcacaggctgttctgtgccgacccgaaggagcaatgggtcaaggacgcgatgcagcatctggaccgccaggctgctgccctaactcgaaatggcggcaccttcgagaagcagatcggcgaggtgaagcccaggaccacccctgccgccgggggaatggacgagtctgtggtcctggagcccgaagccacaggcgaaagcagtagcctggagccgactccttcttcccaggaagcacagagggccctggggacctccccagagctgccgacgggcgtgactggttcctcagggaccaggctccccccgacgccaaaggctcaggatggagggcctgtgggcacggagcttttccgagtgcctcccgtctccactgccgccacgtggcagagttctgctccccaccaacctgggcccagcctctgggctgaggcaaagacctctgaggccccgtccacccaggacccctccacccaggcctccactgcgtcctccccagccccagaggagaatgctccgtctgaaggccagcgtgtgtggggtcagggacagagccccaggccagagaactctctggagcgggaggagatgggtcccgtgccagcgcacacggatgccttccaggactgggggcctggcagcatggcccacgtctctgtggtccctgtctcctcagaagggacccccagcagggagccagtggcttcaggcagctggacccctaaggctgaggaacccatccatgccaccatggacccccagaggctgggcgtccttatcactcctgtccctgacgcccaggctgccacccggaggcaggcggtggggctgctggccttccttggcctcctcttctgcctgggggtggccatgttcacctaccagagcctccagggctgccctcgaaagatggcaggagagatggcggagggccttcgctacatcccccggagctgtggtagtaattcatatgtcctggtgcccgtgtgaactcctctggcctgtgtctagttgtttgattcagacagctgcctgggatccctcatcctcatacccacccccacccaagggcctggcctgagctgggatgattggaggggggaggtgggatcctccaggtgcacaagctccaagctcccaggcattccccaggaggccagccttgaccattctccaccttccagggacagagggggtggcctcccaactcaccccagccccaaaactctcctctgctgctggctggttagaggttccctttgacgccatcccagccccaatgaacaattatttattaaatgcccagccccttctgacccatgctgccctgtgagtactacagtcctcccatctcacacatgagcatcaggccaggccctctgcccactccctgcaacctgattgtgtctcttggtcctgctgcagttgccagtcaccccggccacctgcggtgctatctcccccagccccatcctctgtacagagcccacgcccccactggtgacatgtcttttcttgcatgaggctagtgtggtgtttcctgggcactgcttccagtgaggctctgcccttggttaggsattgtgggaaggggagataagggtatctggtgactttcctctttggtctacactgtgctgagtctgaaggctgggttctgatcctagttccaccatcaagccaccaacatactcccatctgtgaaaggaaagagggaggtaaggaatacctgtccccctgacaacactcattgacctgaggcccttctctccagcccctggatgcagcctcacagtccttaccagcagagcaccttagacagtccctgccaatggactaacttgtctttggaccctgaggcccagagggcctgcargggagtgagttgatagcacagaccctgccctgtgggcccccaaatggaaatgggcagagcagagaccatccctgaaggccccgcccaggcttagtcactgagacagcccgggctctgcttcccatcacccgctaagagggagggagggctccagacacatgtccaagaagcccaggaaaggctccaggagcagccacattcctgatgcttcttcagagactcctgcaggcagccaggccacaagacccttgtggtcccaccccacacacgccagattctttcctgaggctgggctcccttcccacctctctcactccttgaaaacactgttctctgccctccaagaccttctccttcacctttgtccccaccgcagacaggaccaggggatttccatgatgttttccatgagtcccctgtttgtttctgaaagggacgctacccgggaagggggctgggacatgggaaaggggaagttgtaggcataaagtcaggggttcccttttttggctgctgaaggctcgagcatgcctggatggggctgcaccggctggcctggcccctcagggtccctggtggcagctcacctctcccttggattgtccccgacccttgccgtctacctgaggggcctcttatgggctgggttctacccaggtgctaggaacactccttcacagatgggtgcttggaggaaggaaacccagctctggtccatagagagcaaaacgctgtgctgccctgcccaccctggcctctgcactcccctgctgggtgtggcgcagcatattcaggaagctcagggccctggctcaggtggggtcactctggcagctcagagagggtgggagtgggtccaatgcactttgttctggctcttccaggctgggagagcctttcaggggtgggacaccctgtgatggggccctgcctcctttgtgaggaagccgctggggccagttggtcccccttccatggactttgttagtttctccaagcaggacatggacaaggatgatctaggaagactttggaaagagtaggaagactttggaaagacttttccaaccctcatcaccaacgtctgtgccattttgtattttactaataaaatttaaaagtcttgtgaaaaaaaaaaaaaaaaaaaaaaa

SEQ ID NO: 319 - DNA, 2691 bp, Homo sapiens
gcttgcccgtcggtcgctagctcgctcggtgcgcgtcgtcccgctccatggcgctcttcgtgcggctgctggctctcgccctggctctggccctgggccccgccgcgaccctggcgggtcccgccaagtcgccctaccagctggtgctgcagcacagcaggctccggggccgccagcacggccccaacgtgtgtgctgtgcagaaggttattggcactaataggaagtacttcaccaactgcaagcagtggtaccaaaggaaaatctgtggcaaatcaacagtcatcagctacgagtgctgtcctggatatgaaaaggtccctggggagaagggctgtccagcagccctaccactctcaaacctttacgagaccctgggagtcgttggatccaccaccactcagctgtacacggaccgcacggagaagctgaggcctgagatggaggggcccggcagcttcaccatcttcgcccctagcaacgaggcctgggcctccttgccagctgaagtgctggactccctggtcagcaatgtcaacattgagctgctcaatgccctccgctaccatatggtgggcaggcgagtcctgactgatgagctgaaacacggcatgaccctcacctctatgtaccagaattccaacatccagatccaccactatcctaatgggattgtaactgtgaactgtgcccggctcctgaaagccgaccaccatgcaaccaacggggtggtgcacctcatcgataaggtcatctccaccatcaccaacaacatccagcagatcattgagatcgaggacacctttgagacccttcgggctgctgtggctgcatcagggctcaacacgatgcttgaaggtaacggccagtacacgcttttggccccgaccaatgaggccttcgagaagatccctagtgagactttgaaccgtatcctgggcgacccagaagccctgagagacctgctgaacaaccacatcttgaagtcagctatgtgtgctgaagccatcgttgcggggctgtctgtagagaccctggagggcacgacactggaggtgggctgcagcggggacatgctcactatcaacgggaaggcgatcatctccaataaagacatcctagccaccaacggggtgatccactacattgatgagctactcatcccagactcagccaagacactatttgaattggctgcagagtctgatgtgtccacagccattgaccttttcagacaagccggcctcggcaatcatctctctggaagtgagcggttgaccctcctggctcccctgaattctgtattcaaagatggaacccctccaattgatgcccatacaaggaatttgcttcggaaccacataattaaagaccagctggcctctaagtatctgtaccatggacagaccctggaaactctgggcggcaaaaaactgagagtttttgtttatcgtaatagcctctgcattgagaacagctgcatcgcggcccacgacaagagggggaggtacgggaccctgttcacgatggaccgggtgctgacccccccaatggggactgtcatggatgtcctgaagggagacaatcgctttagcatgctggtagctgccatccagtctgcaggactgacggagaccctcaaccgggaaggagtctacacagtctttgctcccacaaatgaagccttccgagccctgccaccaagagaacggagcagactcttgggagatgccaaggaacttgccaacatcctgaaataccacattggtgatgaaatcctggttagcggaggcatcggggccctggtgcggctaaagtctctccaaggtgacaagctggaagtcagcttgaaaaacaatgtggtgagtgtcaacaaggagcctgttgccgagcctgacatcatggccacaaatggcgtggtccatgtcatcaccaatgttctgcagcctccagccaacagacctcaggaaagaggggatgaacttgcagactctgcgcttgagatcttcaaacaagcatcagcgttttccagggcttcccagaggtctgtgcgactagcccctgtctatcaaaagttattagagaggatgaagcattagcttgaagcactacaggaggaatgcaccacggcagctctccgccaatttctctcagatttccacagagactgtttgaatgttttcaaaaccaagtatcacactttaatgtacatgggccgcaccataatgagatgtgagccttgtgcatgtgggggaggagggagagagatgtactttttaaatcatgttccccctaaacatggctgttaacccactgcatgcagaaacttggatgtcactgcctgacattcacttccagagaggacctatcccaaatgtggaattgactgcctatgccaagtccctggaaaaggagcttcagtattgtggggctcataaaacatgaatcaagcaatccagcctcatgggaagtcctggcacagtttttgtaaagcccttgcacagctggagaaatggcatcattataagctatgagttgaaatgttctgtcaaatgtgtctcacatctacacgtggcttggaggcttttatggggccctgtccaggtagaaaagaaatggtatgtagagcttagatttccctattgtgacagagccatggtgtgtttgtaataataaaaccaaagaaacata

SEQ ID NO: 320 - DNA, 4180 bp, Homo sapiens
ccagggtgatgctgaagatgatgaccttcttccaaggcctctagagccatcagcctgtgccaggcaccctcgacttgcctagaggcccccaaaagttgcagtccacatcagaggcagagtcagaggcctccatgtcggaggcctcctctgaggacctggtgccacccctggaggctggggcagccccatatagggaggaggaagaggcggcgaagaagaagaaggagaagaagaagaagtccaaaggcctggccaatgtgttctgcgtcttcaccaaagggaagaagaagaagggtcagcccagctcagcggagcccgaggacgcagccgggtccaggcaggggctggatggcccgccccccacagtggaggagctgaaggcggcgctggagcgcgggcagctggaggcggcgcggccgctgctggcgctggagcgggagctggcggcggcggcggcggcgggcggtgtgagcgaggaggagctggtgcggcgccagagcaaggtggaggcgctgtacgagctgctgcgcgaccaggtgctgggcgtgctgcggcggccgctggaggcgccgcccgagcggctgcgccaggcgctggccgtggtggcggagcaggagcgcgaggaccgccaggcggcggcggcggggccggggacctcggggctggcggccacgcgcccgcggcgctggctgcagctgtggcggcgcggcgtggcggaggcggccgaggagcgcatgggccagcggccggccgcgggcgccgaggtccccgagagcgtctttctgcacttgggccgcaccatgaaggaggacctggaggccgtggtggagcggctgaagccgctgttccccgccgagttcggcgtcgtggcggcctacgccgagagctaccaccagcacttcgcggcccacctggccgccgtggcgcagttcgagctgtgcgagcgcgacacctacatgctgctgctctgggtggagaacctctaccccaatgacatcatcaacagccccaagctggtgggtgagctgcagggtatggggctcgggagcctcctgccccccaggcagatccgactgctggaggccacattcctgtccagtgaggcggccaatgtgagggagttgatggaccgagctctggagctagaggcacggcgctgggctgaggatgtgcctccccagaggctggacggccactgccacagcgagctggccatcgacatcatccagatcacctcccaggcccaggccaaggccgagagcatcacgctggacttgggctcacagataaagcgggtgctgctggtggagctgcctgcgttcctgaggagctaccagcgcgcctttaatgaatttctggagagaggcaagcagctgacgaattacagggccaatgttattgccaacatcaacaactgcctgtccttccggatgtccatggagcagaattggcaggtaccccaggacaccctgagcctcctgctgggccccctgggtgagctcaagagccacggctttgacaccctgctccagaacctgcatgaggacctgaagccactgttcaagaggttcacgcacacccgctgggcggcccctgtggagaccctggaaaacatcatcgccactgtagacacgaggctgcctgagttctcagagctgcagggctgtttccgggaggagctcatggaggccttgcacctgcacctggtgaaggagtacatcatccaactcagcaaggggcgcctggtcctcaagacggccgagcagcagcagcagctggctgggtacatcctggccaatgctgacaccatccagcacttctgcacccagcacggctccccggcgacctggctgcagcctgctctccctacgctggccgagatcattcgcctgcaggaccccagtgccatcaagattgaggtggccacttatgccacctgctaccctgacttcagcaaaggccacctgagcgctatcctggccatcaaggggaacctatccaacagtgaggtcaagcgcatccggagcatcttggacgtcagcatgggggcgcaggagccctcccggcccctattttcccttataaaggttggttagcttttcctgtggcctgacctgcctgtgagtgcccagcaagccttgggcacaccccgctgggagctgttaagagcagcgctggttctcggttcctcccgggtctcctgtgctctgatgctacttctgcctagccctggcggaggtgcaggccctgtcagctggaactggacagaccttggtttgtttacatgtccgatgggggcaggagctcccatcctgggcagccaaccaggcaacaccaaggactctttgtaaacgatagctgatcgtgtgcacgcaaggaaagaaccaggagggagagtgcagccaggctcagggatccccggacacctctgtccagagcccctccacagtcggcctcatgactgtcctcctcgtgggtggggccgagggccctcttcagctctctggagacaggggccgagcctcacccatctgccctctgcagcccagggccgccgtgagcgggattcagcaatggtggaatggaagacagaactggaagagaaagaaggaaaagatgagctctcgtctggcaggggcttttagggtcctgtggcgagctgtgagcaccgccagcgttagacgtcacatccaggtggccccacggcccctacaggctggccctgcaatggggccctgagccctccctcttcatcccccaaggcctcaactagagggtggtcccccgagggcttggtgtctactaccgaagggcccaagacctcctgggtcctctcaggctcccccttccccaaggcagggacaggccctgggggtgccaccgtgggccctgccacccagaagtctggctgaggtctgggcaggggcagggcaagcttgacctctcactgttgaccctttggcctctgtatttgtttcctattgccgtgacaggtttccacaaacttcgtggatcaaaacgaggtcttccagttctgcgggtcagaaggctgacctggggctcaaatctgggtgtcggcagtcctgcactccttctggaggctctaggggagaattcatttctggccttttcatttttagaggctgaccgtaattcttgacttcaggctcctccatcttcagagccagctgtgggtagttgaatctttttcccgtcacctcattgaggcctcccctctcctgcctccctccaccacttttttttttttttttttgagacagggtcttgctgtgttgcccaggctggagtgcagtggcctggtcatggcatcaaggctcactgcagcctggacctcctggttcaagtgatcctcttgtctcagtcccctgagacaatcccccacgcccagctacatatttttgtggatacagggtctcattctgttgcctaggcttgtctggaactcctgggctcaagggatcttgtagccttagcctcctaaagtgctgggattataggcatgagtcactcgtacccggcctgctctaccgcttttaaggacgcttatgatcacattgcgcctacccagagaacccaggtcgtctttctattttcaggtcagctgattagccaccttagttccatctgcaactttagttcccactggctgtgtaacctaacatagtcacaggctctggggactgtcacgtggacatctttgggaggccgttattctgcccaccgcaccctccgttcatcccctgccctgccgggcacctcgctctaccccaggaaaatgtgagctcgttttcctgctcggcatgtgctccccctaaggctctgctcctccctgggcctgaaagttccttctcagcctgagagggggcccttcgatctcaggcatgactcagcccggctgatgcctctgcagtgctgagtcaggatttggggccggctctcttgggtctgtccccttttcccaggtactgccttacaaagctgtggccaggaagtggccggtataaaggatgcccaaggtctttgtacgtgtgtaggagttagcgtgtttgatattgttaatataataataattattttttagagtactgcttttgtatgtatgttgaacaggatccaggtttttatagcttgatataaaacagaattcaaaagtgaaaaa

SEQ ID NO: 321 - DNA, 3722 bp, Homo sapiens
ggtttcattcgaggtttcgggccgaggatgccagcccccatcagattgcgggagctgatccggaccatccggacagcccgaacccaagctgaagaacgagaaatgatccagaaagaatgtgctgcaatccggtcatcttttagagaagaagacaatacataccgatgtcggaatgtggcaaaattactgtatatgcacatgctgggctaccctgctcactttggacagttggagtgcctcaagcttattgcctctcaaaaatttacagacaaacgcattggctatttaggggcaatgctgctgttagatgaaagacaagatgtccatcttctcatgaccaactgtatcaagaatgatcttaatcatagcacgcaattcgtacaggggttagcactttgtaccctcggctgcatgggctcctcagagatgtgcagagatcttgcaggagaggtagagaagctcctgaaaacctccaactcttacttaagaaaaaaggcagcactgtgtgctgttcatgtcatcaggaaagttcctgaacttatggagatgtttttaccagcaacaaaaaatttattgaatgagaagaaccatggtgtcctccacacatctgtagtcctcctcacagaaatgtgtgagcgaagcccagacatgcttgcgcatttcagaaagtctctgcagcttgtgccccaattagttcgtattttaaagaacctcatcatgtccggatattcaccagaacatgatgtttctggtatcagtgacccctttttgcaggtacgaattttgcggttattaagaattttaggacgaaatgatgatgattcaagtgaagctatgaatgatatattagcacaggttgccactaatactgagactagtaaaaatgtaggaaatgctattctttatgaaacggttttgactatcatggatattaagtcagagagtggattgcgagtcctagccataaatatcctgggtcgtttcttattgaacaatgacaagaatattagatatgtggctctgacatctttgttgaagactgtacagacagatcataatgcagtacagaggcacagaagcacaattgtggactgtcttaaagatttggatgtctcaataaaacggcgtgcaatggaattgagttttgccctggtaaatgggaataatatccgaggcatgatgaaagaattactttattttctggattcgtgtgagccagaatttaaagcagactgtgcatctggaatctttcttgctgcagaaaagtatgcaccttccaaacgatggcatatagacacaattatgcgtgttttgacaacggcaggaagttatgttcgtgatgatgcagtccccaatttaatccagttaataactaatagtgtggagatgcatgcctatactgtccagcgcctgtacaaagcaattcttggtgattattctcaacaacctttggtacaagtggctgcatggtgtataggtgaatatggtgatcttcttgtatctggccagtgtgaagaggaagagcctattcaggtaacagaggatgaagtgttggatattttagaaagtgtcctaatctctaatatgtccacctctgtgacacgaggttatgccctcactgccattatgaagctttccactcgattcacttgtactgtaaaccgaattaagaaagtggtttccatctacggaagcagcattgatgtggaactccagcagagggcagtagaatataatgcacttttcaagaaatatgaccacatgaggtctgccctacttgagagaatgcctgtcatggaaaaagtgaccacaaatggccctactgagattgtgcagacaaatggagagacagaaccagctccactagagaccaaaccgccaccctctgggccacagcccaccagccaggccaatgatttattggatttgttgggaggaaatgacataacacctgttattccaactgcgcctacaagcaaaccatcttctgctggtggagaacttcttgatttgctgggagacatcaaccttacaggtgctccagctgctgctcctgcccctgcctcagtcccacagatatcccagccccccttcttgttggatgggctttcatcacagcctctcttcaatgatattgctgcaggcatcccctccatcacagcatacagtaagaatggcttgaagatagaattcacctttgaacggtcaaataccaaccccagtgtaacagtgataacgatacaggcctccaacagcacagagctagatatgacggactttgttttccaagctgcagtaccaaagacattccagctgcagctcttgtctcctagcagcagcattgtcccagcatttaacacggggaccatcacacaagtcattaaagttctgaaccctcagaagcaacagctgcgaatgcggatcaagcttacatataatcacaagggctcagcaatgcaagatctagcagaggtgaacaactttccccctcagtcctggcaatgagggtttggcaccattctcattctttatcccactcaatcaaaggaactctgggaaggaggttgtgattgctggcaagtcccccccaactgtaccacgggcatgaggagctgaagagaactgctgaggaggattttcctaaagttactgctgaccttgaagcattgttaaagactaatgtcctctcctccactgttgaggctggctgcttctggaggctactttgcactcttcctcttctcctttttccgcacttctccacccctcccacatttacagccagaatcaacattccctgggcccctgaggaaataagcagctggtctggaagaaaaggactgcaatccatggcgaaaaaaacactcactttgtctctgcagcaaagagttgccccttctttctactgttgtttctctgtggactgggcaaggtggggtatttattcctcactagctgggttaccatcttcaggcacttttaacatctggcattcggaatggaaatgtaataatggacattagggagccctgcctttttctactggttcccccaatgtttgaaagaggcattaggctcctggtagccttttctgtgcattgctgtatacacacagacacacacatgtatgtttgttaccaagaactggtcagaccttgcgagtttatttgtaaacactggacagatggagttaaaaagagcttttgttgagatttggcatgaaggatatggtgctctatttgtaatagaaacttccaaggctcttccagctcccctttctcgccattctttagctgtagtcatgaatagtctccatgattttcaaaattgattccctttaaagtgcaaaatggtcaccttctaaaagatatattcatagttattaatgaccctattcccaccacaaattttaaagtgctcctaagcccataacttgcctgtttgaactatggtaatgggtggaagaggagttcaccagtttcaaagatcagactctgtatcaaaagtacctttgcccttaggaagagtgagtattggagtcatcttatctattactccaaacctccctttttatttcttgagcctggcttggaccttggcattccgtttgaattccttctaactggaacatttgtgttgtatctgtaacactggcactgaaataaagaccacacggttaaaaaaaaaaaaaaaaaaaaaaaaaaaaaaaaaaaaaaaaaaaa

SEQ ID NO: 322 - DNA, 1279 bp, Homo sapiens
gggggaccgctgacctggcgctttgtgcggctccaggcctccgagtggactccagaaagcctgaaaagctatcatggcagcaaggcccaagctccactatcccaacggaagaggccggatggagtccgtgagatgggttttagctgccgccggagtcgagtttgatgaagaatttctggaaacaaaagaacagttgtacaagttgcaggatggtaaccacctgctgttccaacaagtgcccatggttgaaattgacgggatgaagttggtacagacccgaagcattctccactacatagcagacaagcacaatctctttggcaagaacctcaaggagagaaccctgattgacatgtacgtggaggggacactggatctgctggaactgcttatcatgcatcctttcttaaaaccagatgatcagcaaaaggaagtggttaacatggcccagaaggctataattagatactttcctgtgtttgaaaagattttaaggggtcacggacaaagctttcttgttggtaatcagctgagccttgcagatgtgattttactccaaaccattttagctctagaagagaaaattcctaatatcctgtctgcatttcctttcctccaggaatacacagtgaaactaagtaatatccctacaattaagagattccttgaacctggcagcaagaagaagcctccccctgatgaaatttatgtgagaaccgtctacaacatctttaggccataaaacaacacatccatgtgtgagtgacagtgtgttcctagagatggtattgtctacagtcatgtcttaatggatcccagctctgtcatggtgctatctatgtattaagttgggtcctaagttgggtcttttgtgtcaaagagatcatctcttctagaaatatcaaccttttttgtccagtaaataattgttaggggatctttattggaaaacttttttggagaggctggtatttaagttagatctgattgggctactcatgttcctgtagccagttcatcctcataataagaatgggcaggatctcttgttctctcctgagtgtctttctactctcctgagcgtctttctgctctccttatcctgttctcttatccttatcccctccagtctctgcctaatttttagtgtttaataacaaccgaatgtctagtaaatgactctcctctgagctgtaataaataaaatggtagtaatgaatgcaatcagtgttagccaaaataaagaatttatgagtcattaaaaaaaaaaaaaaaaaaa

SEQ ID NO: 323 - DNA, 1331 bp, Homo sapiens
cccacgcgtccgcccacgcgtccgcagaaatggattcgaaatatcagtgtgtgaagctgaatgatggtcacttcatgcctgtcctgggatttggcacctatgcgcctgcagaggttcctaaaagtaaagctttagaggccaccaaattggcaattgaagctggcttccgccatattgattctgctcatttatacaataatgaggagcaggttggactggccatccgaagcaagattgcagatggcagtgtgaagagagaagacatattctacacttcaaagctttggtgcaattcccatcgaccagagttggtccgaccagccttggaaaggtcactgaaaaatcttcaattggattatgttgacctctaccttattcattttccagtgtctgtaaagccaggtgaggaagtgatcccaaaagatgaaaatggaaaaatactatttgacacagtggatctctgtgccacgtgggaggccgtggagaagtgtaaagatgcaggattggccaagtccatcggggtgtccaacttcaaccgcaggcagctggagatgatcctcaacaagccagggctcaagtacaagcctgtctgcaaccaggtggaatgtcatccttacttcaaccagagaaaactgctggatttctgcaagtcaaaagacattgttctggttgcctatagtgctctgggatcccaccgagaagaaccatgggtggacccgaactccccggtgctcttggaggacccagtcctttgtgccttggcaaaaaagcacaagcgaaccccagccctgattgccctgcgctaccagctacagcgtggggttgtggtcctggccaagagctacaatgagcagcgcatcagacagaacgtgcaggtgtttgaattccagttgacttcagaggagatgaaagccatagatggcctaaacagaaatgtgcgatatttgacccttgatatttttgctggcccccctaattatccattttctgatgaatattaacatggagggcattgcatgaggtctgccagaaggccctgcgtgtggatggtgacacagaggatggctctatgctggtgactggacacatcgcctctggttaaatctctcctgcttggtgatttcagcaagctacagcaaagcccattggccagaaaggaaagacaataattttgttttttcattttgaaaaaattaaatgctctctcctaaaaaaaaaaaaaaaaaaaaaaaaaaaaaaaaaaaaaaaaaaaaaaaaaaaaaaaaaaaaaaaaaaaaaaaaaaaaaaaaaaaaaaaaaaaaaaaaaaaaaaaaaaaaaaaaaaaaaaaaaa

SEQ ID NO: 324 - DNA, 1456 bp, Homo sapiens
atgcacttgagcagggaagaaatccacaaggactcaccagtctcctggtctgcagagaagacagaatcaacatgagcacagcaggaaaagtaatcaaatgcaaagcagctgtgctatgggagttaaagaaacccttttccattgaggaggtggaggttgcacctcctaaggcccatgaagttcgtattaagatggtggctgtaggaatctgtggcacagatgaccacgtggttagtggtaccatggtgaccccacttcctgtgattttaggccatgaggcagccggcatcgtggagagtgttggagaaggggtgactacagtcaaaccaggtgataaagtcatcccactcgctattcctcagtgtggaaaatgcagaatttgtaaaaacccggagagcaactactgcttgaaaaacgatgtaagcaatcctcaggggaccctgcaggatggcaccagcaggttcacctgcaggaggaagcccatccaccacttccttggcatcagcaccttctcacagtacacagtggtggatgaaaatgcagtagccaaaattgatgcagcctcgcctctagagaaagtctgtctcattggctgtggattttcaactggttatgggtctgcagtcaatgttgccaaggtcaccccaggctctacctgtgctgtgtttggcctgggaggggtcggcctatctgctattatgggctgtaaagcagctggggcagccagaatcattgcggtggacatcaacaaggacaaatttgcaaaggccaaagagttgggtgccactgaatgcatcaaccctcaagactacaagaaacccatccaggaggtgctaaaggaaatgactgatggaggtgtggatttttcatttgaagtcatcggtcggcttgacaccatgatggcttccctgttatgttgtcatgaggcatgtggcacaagtgtcatcgtaggggtacctcctgattcccaaaacctctcaatgaaccctatgctgctactgactggacgtacctggaagggagctattcttggtggctttaaaagtaaagaatgtgtcccaaaacttgtggctgattttatggctaagaagttttcattggatgcattaataacccatgttttaccttttgaaaaaataaatgaaggatttgacctgcttcactctgggaaaagtatccgtaccattctgatgttttgagacaatacagatgttttcccttgtggcagtcttcagcctcctctaccctacatgatctggagcaacagctgggaaatatcattaattctgctcatcacagattttatcaataaattacatttgggggctttccaaagaaatggaaattgatgtaaaattatttttcaagcaaatgtttaaaatccaaatgagaactaaataaagtgttgaacatcagctggggaattgaagccaataaaccttccttcttaaccatt

SEQ ID NO: 325 - DNA, 1713 bp, Homo sapiens
ccaagggagaaaactattctgtcaaagagacggtgccaaaaggcaaaaacaaaggagctgatggcaaagaaggtagctgtgattggagctggggtcagtggcctaatttctctgaagtgctgtgtggatgagggacttgagcccacttgctttgagagaactgaagatattggaggagtgtggaggttcaaagagaatgtggaagatggccgagcaagtatctatcaatctgtcgttaccaacaccagcaaagaaatgtcctgtttcagtgactttccaatgcctgaagattttccaaacttcctgcataattctaaacttctggaatatttcaggatttttgctaaaaaatttgatctgctaaaatatattcagttccagacaactgtccttagtgtgagaaaatgtccagatttctcatcctctggccaatggaaggttgtcactcagagcaacggcaaggagcagagtgctgtctttgacgcagttatggtttgcagtggccaccacattctacctcatatcccactgaagtcatttccaggtatggagaggttcaaaggccaatatttccatagccgccaatacaagcatccagatggatttgagggaaaacgcatcctggtgattggaatgggaaactcaggctcagatattgctgttgagctgagtaagaatgctgctcaggtttttatcagcaccaggcatggcacctgggtcatgagccgtatctctgaagatggctatccttgggactcagtgttccacacccggtttcgttctatgctccgcaatgtactgccacgaacagctgtaaaatggatgatagaacaacagatgaatcggtggttcaaccatgaaaattatggccttgagcctcaaaacaaatacattatgaaggaacctgtactaaatgatgatgtcccaagtcgtctactctgtggagccatcaaggtgaaatctacagtgaaagagctcacagaaacttctgccatctttgaggatggaacagtggaggagaacattgatgtcatcatttttgcaacaggatatagtttctcttttcccttccttgaagattcactcgttaaagtagagaataatatggtctcactgtataaatacatattccccgctcacctggacaagtcaaccctcgcgtgcattggtctcatccagcccctaggttccattttcccaactgctgaacttcaagctcgttgggtgacaagagttttcaaaggcttgtgtagcctgccctcagagagaactatgatgatggacattatcaaaaggaatgaaaaaagaattgacctgtttggagaaagccagagccagacgttgcagaccaattatgttgactacttggacgagctcgccttagagataggtgcgaagccagatttctgctctctcttgttcaaagatcctaaactggctgtgagactctatttcggaccctgcaactcctattagtatcgcctggttgggcctgggcaatgggaaggagccagaaatgccatcttcacccagaaacaaagaatactgaagccactcaagactcgggccctgaaggattcatctaatttctcagtttcttttctgttgaaaatcctgggccttcttgctgttgttgtggcctttttttgccaacttcaatggtcctagtcagcataatgctttgggctttattatcttgtcagtcactacctc

SEQ ID NO: 326 - DNA, 2709 bp, Homo sapiens
gggtcctgtcccatccatcctgacctgttccatctcagccccaggactcagtactgcggttgccaacactgctgccaggcatgatggatgggccacgttccgatgtgggccgttggggtggcaaccccttgcagccccctaccacgccatctccagagccagagccagagccagacggacgctctcgcagaggaggaggccgttccttctgggctcgctgctgtggctgctgttcatgccgaaatgcggcagatgacgactggggacctgaaccctctgactccaggggtcgagggtccagctctggcactcgaagacctggctcccggggctcagactcccgccggcctgtatcccggggcagcggtgtcaatgcagctggagatggcaccatccgagagggcatgctagtagtgaacggtgtggacttgctgagctcgcgctcggaccagaaccgccgagagcaccacacagacgagtatgagtacgacgagctgatagtgcgccgcgggcagcctttccatatgctcctcctcctgtcccggacctatgaatcctctgatcgcatcacccttgagttactcatcggaaacaaccccgaggtgggcaagggcacgcacgtgatcatcccagtgggcaaggggggcagtggaggctggaaagcccaggtggtcaaggccagtgggcagaatctgaacctgcgggtccacacttcccccaacgccatcatcggcaagtttcagttcacagtccgcacacaatcagacgctggggagttccagttgccctttgacccccgcaatgagatctacatcctcttcaacccctggtgcccagaggacattgtgtacgtggaccatgaggattggcggcaggagtatgttcttaatgagtctgggagaatttactacgggaccgaagcacagattggtgagcggacctggaactacggccagtttgaccacggggtgctggatgcctgcttatacatcctggaccggcgggggatgccatatggaggccgtggagacccagtcaatgtctcccgggtcatctctgccatggtgaactccctggatgacaatggagtcctgattgggaactggtctggtgattactcccgaggcaccaacccatcagcgtgggtgggcagcgtggagatcctgcttagctacctacgcacgggatattccgtcccctatggccagtgctgggtctttgctggagtgaccaccacagtgctgcgctgcctgggtctggccacccgtactgtcaccaacttcaactccgcccacgacacagacacatcccttaccatggacatctacttcgacgagaacatgaagcccctggagcacctgaaccatgattctgtctggaacttccatgtgtggaacgactgctggatgaagaggccggatctgccctcgggctttgatgggtggcaggtggtggatgccacaccccaagagactagcagtggcatcttctgctgcggcccctgctctgtggagtccatcaagaatggcctggtctacatgaagtacgacacgcctttcatttttgctgaggtgaatagtgacaaggtgtactggcagcggcaggatgatggcagcttcaagattgtttatgtggaggagaaggccatcggcacactcattgtcacaaaggccatcagctccaacatgcgggaggacatcacctacctctataagcacccagaaggctcagacgcagagcggaaggcagtagagacagcagcagcccacggcagcaaacccaatgtgtatgccaaccggggctcagcggaggatgtggccatgcaggtggaggcacaggacgcggtgatggggcaggatctgatggtctctgtgatgctgatcaatcacagcagcagccgccgcacagtgaaactgcacctctacctctcagtcactttctatactggtgtcagtggtaccatcttcaaggagaccaagaaggaagtggagctggcaccaggggcctcggaccgtgtgaccatgccagtggcctacaaggaataccggccccatcttgtggaccagggggccatgctgctcaatgtctcaggccacgtcaaggagagcgggcaggtgctggccaagcagcacaccttccgtctgcgcaccccagacctctccctcacgttactgggagcagcagtggttggccaggagtgtgaagtacagattgtcttcaagaacccccttcccgtcaccctcaccaatgtcgtcttccggctcgaaggctctgggttacagaggcccaagatcctcaacgttggggacattggaggcaatgaaacagtgacactgcgccagtcgtttgtgcctgtgcgaccaggcccccgccagctcattgccagcttggacagcccacagctctcccaggtgcacggtgtcatccaggtggatgtggccccagcccctggggatgggggcttcttctcagacgctggaggtgacagtcacttaggagagaccatccctatggcatctcgaggtggagcttagccctgtgccaggagcaatgggactggagtcagatgagcaaggacattgccccaagataggggcacactacagagcagctccccaggagctcaggtggggagtccagggctcccggagagggagtcagtcttcacttgcactgggggaacagatgctaataaactgttttttaatg

SEQ ID NO: 327 - DNA, 1470 bp, Homo sapiens
atgcactcaagcagagaagaaatccacaagtactcaccagcctcctggtctgcagagaagacagaatcaatatgagcacagcaggaaaagtaatcaaatgcaaagcagctgtgctatgggagttaaagaaacccttttccattgaggaggtagaggttgcacctcctaaggctcatgaagttcgcattaagatggtggctgcaggaatctgtcgttcagatgagcatgtggttagtggcaacctggtgaccccccttcctgtgattttaggccatgaggcagccggcatcgtggaaagtgttggagaaggggtgactacagtcaaaccaggtgataaagtcatcccgctctttactcctcagtgtggaaaatgcagaatttgtaaaaacccagaaagcaactactgcttgaaaaatgatctaggcaatcctcgggggaccctgcaggatggcaccaggaggttcacctgcagcgggaagcccatccaccacttcgtcggcgtcagcaccttctcccagtacacagtggtggatgagaatgcagtggccaaaattgatgcagcctcgcccctggagaaagtctgcctcattggctgtggattttcgactggttatgggtctgcagtcaaagttgccaaggtcaccccagggtctacctgtgctgtgtttggcctgggaggggtcggcctatctgttgttatgggctgtaaagcagctggagcagccagaatcattgctgtggacatcaacaaggacaaatttgcaaaggctaaagagttgggggccactgaatgcatcaaccctcaagactacaagaaacccattcaggaagtgctaaaggaaatgactgatggaggtgtggatttttcgtttgaagtcatcggtcggcttgacaccatgatggcttccctgttatgttgtcatgaggcatgtggcacaagtgtcattgtaggggtacctcctgattcccagaacctctcaataaaccctatgctgctactgactggacgcacgtggaaaggagctatttttggaggctttaagagtaaagaatctgtcccgaaacttgtggctgactttatggctaagaagttttcactggatgcattaataacaaatattttaccttttgaaaaaataaatgaaggatttgacctgcttcgctctggaaagagtatccgtaccgtcctgacgttttgaaacaatacagatgccttcccttgtagcagttttcagcctcctctaccctacatgatctggagcaacagctaggaaatatcattaattctgctcttcagagatgttaaaaataaattacacgtgggagctttccaaagaaatggaaattgatgggaaattatttgtcaagcaaatgtttaaaatccaaatgagaactaaataaagtgttgaacatcaactggggaattgaagccaataaaccttccttcttaaccattcaaaaaaaaaaaaa

SEQ ID NO: 328 - DNA, 2775 bp, Homo sapiens
gtactcgccacggcacccaggctgcgcgcacgcggtcccggtgtgcagctggagagcgagcggccaccgggagcccccggcacagcccgcgcccgccccgcaggagcccgcgaagatgccccggcgcagcctgcacgcggcggccgtgctcctgctggtgatcttaaaggaacagccttccagcccggccccagtgaacggttccaagtggacttattttggtcctgatggggagaatagctggtccaagaagtacccgtcgtgtgggggcctgctgcagtcccccatagacctgcacagtgacatcctccagtatgacgccagcctcacgcccctcgagttccaaggctacaatctgtctgccaacaagcagtttctcctgaccaacaatggccattcagtgaagctgaacctgccctcggacatgcacatccagggcctccagtctcgctacagtgccacgcagctgcacctgcactgggggaacccgaatgacccgcacggctctgagcacaccgtcagcggacagcacttcgccgccgagctgcacattgtccattataactcagacctttatcctgacgccagcactgccagcaacaagtcagaaggcctcgctgtcctggctgttctcattgagatgggctccttcaatccgtcctatgacaagatcttcagtcaccttcaacatgtaaagtacaaaggccaggaagcattcgtcccgggattcaacattgaagagctgcttccggagaggaccgctgaatattaccgctaccgggggtccctgaccacacccccttgcaaccccactgtgctctggacagttttccgaaaccccgtgcaaatttcccaggagcagctgctggctttggagacagccctgtactgcacacacatggacgacccttcccccagagaaatgatcaacaacttccggcaggtccagaagttcgatgagaggctggtatacacctccttctcccaagtgcaagtctgtactgcggcaggactgagtctgggcatcatcctctcactggccctggctggcattcttggcatctgtattgtggtggtggtgtccatttggcttttcagaaggaagagtatcaaaaaaggtgataacaagggagtcatttacaagccagccaccaagatggagactgaggcccacgcttgaggtccccggagctcccgggcacatccaggaaggaccttgctttggaccctacacacttcggctctctggacacttgcgacacctcaaggtgttctctgtagctcaatctgcaaacatgccaggcctcagggatcctctgctgggtgcctccttgccttgggaccatggccaccccagagccatccgatcgatggatgggatgcactctcagaccaagcagcaggaattcaaagctgcttgctgtaactgtgtgagattgtgaagtggtctgaattctggaatcacaaaccaagccatgctggtgggccattaatggttggaaaacactttcatccggggctttgccagagcgtgctttcaagtgtcctggaaagtctgctgcttctccaagctttcagacaagaatgtgcactctctgcttaggttttgcttgggaaactcaacttctttcctctggagacggggcatctccctctgatttccttctgctatgacaaaacctttaatctgcaccttacaactcggggacaaatggggacaggaaggatcaagttgtagagagaaaaaagaaaacaagagatatacattgtgatatattagggacactttcacagtcctgtcctctggatcacagacactgcacagaccttagggaatggcaggttcaagttccacttcttggtggggatgagaagggagagagagctagagggacaaagagaatgagaagacatggatgatctgggagagtctcactttggaatcagaattggaatcacattctgtttatcaagccataatgtaaggacagaataatacaatattaagtccaaatccaacctcctgtcagtggagcagttatgttttatactctacagattttacaaataatgaggctgttccttgaaaatgtgttgttgctgtgtcctggaggagacatgagttccgagatgacccaatctgcctttgaatctggaggaaataggcagaaacaaaatgactgtagaacttattctctgtaggccaaatttcatttcagccacttctgcaggatccctactgccaacctggaatggagacttttatctacttctctctctctgaagatgtcaaatcgtggtttagatcaaatatatttcaagctataaaagcaggaggttatctgtgcagggggctggcatcatgtatttaggggcaagtaataatggaatgctactaagatactccatattcttccccgaatcacacagacagtttctgacaggcgcaactcctccattttcctcccgcaggtgagaaccctgtggagatgagtcagtgccatgactgagaaggaaccgacccctagttgagagcaccttgcagttccccgagaactttctgattcacagtctcattttgacagcatgaaatgtcctcttgaagcatagctttttaaatatctttttccttctactcctccctctgactctaagaattctctcttctggaatcgcttgaacccaggaggcggaggttgcagtaagccaaggtcatgccactgcactctagcctgggtgacagagcgagactccatctcaaaaaaaaaaaaaaaa

SEQ ID NO: 329 - DNA, 4248 bp, Homo sapiens
cccgggctgtgggctacaggcgcagagcgggccaggcgcggagctggcggcagtgacaggaggcgcgaacccgcagcgcttaccgcgcggcgccgcaccatggagcccgccgtgtcgctggccgtgtgcgcgctgctcttcctgctgtgggtgcgcctgaaggggctggagttcgtgctcatccaccagcgctgggtgttcgtgtgcctcttcctcctgccgctctcgcttatcttcgatatctactactacgtgcgcgcctgggtggtgttcaagctcagcagcgctccgcgcctgcacgagcagcgcgtgcgggacatccagaagcaggtgcgggaatggaaggagcagggtagcaagaccttcatgtgcacggggcgccctggctggctcactgtctcactacgtgtcgggaagtacaagaagacacacaaaaacatcatgatcaacctgatggacattctggaagtggacaccaagaaacagattgtccgtgtggagcccttggtgaccatgggccaggtgactgccctgctgacctccattggctggactctccccgtgttgcctgagcttgatgacctcacagtggggggcttgatcatgggcacaggcatcgagtcatcatcccacaagtacggcctgttccaacacatctgcactgcttacgagctggtcctggctgatggcagctttgtgcgatgcactccgtccgaaaactcagacctgttctatgccgtaccctggtcctgtgggacgctgggtttcctggtggccgctgagatccgcatcatccctgccaagaagtacgtcaagctgcgtttcgagccagtgcggggcctggaggctatctgtgccaagttcacccacgagtcccagcggcaggagaaccacttcgtggaagggctgctctactccctggatgaggctgtcattatgacaggggtcatgacagatgaggcagagcccagcaagctgaatagcattggcaattactacaagccgtggttctttaagcatgtggagaactatctgaagacaaaccgagagggcctggagtacattcccttgagacactactaccaccgccacacgcgcagcatcttctgggagctccaggacatcatcccctttggcaacaaccccatcttccgctacctctttggctggatggtgcctcccaagatctccctcctgaagctgacccagggtgagaccctgcgcaagctgtacgagcagcaccacgtggtgcaggacatgctggtgcccatgaagtgcctgcagcaggccctgcacaccttccaaaacgacatccacgtctaccccatctggctgtgtccgttcatcctgcccagccagccaggcctagtgcaccccaaaggaaatgaggcagagctctacatcgacattggagcatatggggagccgcgtgtgaaacactttgaagccaggtcctgcatgaggcagctggagaagtttgtccgcagcgtgcatggcttccagatgctgtatgccgactgctacatgaaccgggaggagttctgggagatgtttgatggctccttgtaccacaagctgcgagagaagctgggttgccaggacgccttccccgaggtgtacgacaagatctgcaaggccgccaggcactgagctggagcccgcctggagagacagacacgtgtgagtggtcaggcatcttcccttcactcaagcttggctgctttcctagatccacactttcaaagagaaacccctccagaactcccaccctgacagcccaacaccaccttcctcctggcttccagggggcagcccagtggaatggaaagaatgtgggatttggagtcagacaagcctgagtccagttccccgtttagaactcattagctgtgtgactctgggtgagtcccttaacccctctgagcccgggtctcttcattagttgaaagggatagtaatacctacttgcaggttgttgtcatctgagttgagcactggtcacattgaaggtgctgggtaagtggtagctcttgttgcttcccgttcagcgtcacatctgcagtggagcctgaaaaggctccacattaggtcacctgtgcacagccatggctggaatgatgaaggggatacgctggagttgccctgccatcgcctccatcagccagacgaggtcctcacaggagaaggacagctcttccccaccctgggatctcaggagggcagccacggagtggggaggccccagatgcgctgtgccaaagccaggtccgaggccaaagttctccctgccatccttggtgccgtcctgccccttcctccttcatgcctgggcctgcaggcccaccccagccaccactgagtccactcggagtgccctgtgttcctggagaaggcattccagggttgaatcttgtcccagcctcagcctgggacacctaggtggagagagtggtctccgctctgaattggatccaggggacctgggctcattcttcttggctcaccaaccctgcaggcctcatctttcccaaaacccactttgtcttggtgggagtgggtccgcgctgctctgcagcaggggctggggagtggacagcatcaggtgggaaagtggagtccaccctcatgtttctgtaggattctcaccgtggggctggaagaaaagagcatcgacttgatttctccaaccactcatccctctttttctttcttccaccactccccaccccagctgtagttaatttcagtgccttacaaatcctaagctcagagaaagttccatttccgttccagagggaagggaacctccctaggtccttccctggcttgttataacgcaaagcttggttgtttatgcaactctatcttaagaactgcccagcctcagctgaaaacccgaatctgagaaggaattgcgtcatgtaagggaagctggaattaagggagctgagccagtcatggttgtggcgtgtgagtcaggagacctaggtttcagcccctctctactgtcagcgagctgtgcaacgtgggcaagtcattgtcctctgagctgcagtttcctcatctgtcacatcgctacagacaagacctccctggaacccttctgattgtcttagacactgtggttgcaaaacccacggaaagcctcatttgtgtggaaagtcagaggaaaaatgatccagtggacacttggggattatctgtcattcaagatccttccttcaaccccaaggccagctcccatctcatttccagaaaggctcatacctggcttgcagggaagcatctgtcttgtcattccaggtgccagaatcctctcagagtcattgaagggtgttcacccatcccacccaaggcttggcacactgccagtgtcttagcagggtcttgtgagggctgggggcatccaggcactcagaaggcaaaggaaccaccctacccatttggcctctggagggggcagaagaaagaaagaaacctcatcctatattttacaaagcatgtgaattctggcattagctctcataggagacccatgtgcttccttgctcagtgcaaaactgatgattctacttgctgtagatgaatggttaacacgagctagttaaacagtgccattgttttgccagtgaagcctccaaccctaagccactgggacggtggccagagatgccagcagcctctgtcgcccttagtcatataaccaaaatccagaccttatccacaacccggggcttggaaaggaaggtattttggaatcacaccctccggttatgttgctccagtaaaatcttgcctggaaagaggcagtcttcttagcatggtgagctgagttcatggcttttttttgtagccagtcctgtccctggccatccatgtgatggttttggatggagttaaacttgatgccagtgggcagtgcatgtggaaagtatcagagtaagcctctcccctccagagccctgagtttcttggctgcatgaaggttttctttagaatcagaattgtagccagtttctttggccagaaggatgaatacttggatattactgaaagggaggggtggagatgggtgtggcagtgtatggtgtgtgatttttattttcttctttggtcatgggggccaaggagaaaggcatgaatcttccctgtcaggctcttacagccacaggcactgtgtctactgtctggaagacatgtccccgtggctgtggggccgctgcttctgtttaaataaaagtggcctgg

SEQ ID NO: 330 - DNA, 2643 bp, Homo sapiens
ccgcacttccagctctctgcgcagcccgccgcgcagcccgccgccccagccatggcgaagcccctgacggaccaggagaagcggcggcagatcagcatccgcggcatcgtgggcgtggagaacgtggcagagctgaagaagagtttcaaccggcacctgcacttcacgctggtcaaggaccgcaacgtggccaccacccgcgactactacttcgcgctggcgcacacggtgcgcgaccacctggtggggcgctggatccgcacgcagcagcactactacgacaagtgccccaagagggtatattacctctctctggaattttacatgggccgaacattacagaacaccatgatcaacctcggtctgcaaaatgcctgtgatgaggccatttaccagcttggattggatatagaagagttagaagaaattgaagaagatgctggacttggcaatggtggtcttgggagacttgctgcctgcttcttggattccatggcaaccctgggacttgcagcctatggatacggcattcggtatgaatatgggattttcaatcagaagatccgagatggatggcaggtagaagaagcagatgattggctcagatatggaaacccttgggagaagtcccgcccagaattcatgctgcctgtgcacttctatggaaaagtagaacacaccaacaccgggaccaagtggattgacactcaagtggtcctggctctgccatatgacacccccgtgcccggctacatgaataacactgtcaacaccatgcgcctctggtctgctcgggcaccaaatgactttaacctcagagactttaatgttggagactacattcaggctgtgctggaccgaaacctggccgagaacatctcccgggtcctctatcccaatgacaatttttttgaagggaaggagctaagattgaagcaggaatactttgtggtggctgcaaccttgcaagatatcatccgccgtttcaaagcctccaagtttggctccacccgtggtgcaggaactgtgtttgatgccttcccggatcaggtggccatccagctgaatgatactcaccctgcactcgcgatccctgagctgatgaggatttttgtggatattgaaaaactgccctggtccaaggcatgggagctcacccagaagaccttcgcctacaccaaccacacagtgctcccggaagccctggagcgctggcccgtggacctggtggagaagctgctccctcgacatttggaaatcatttatgagataaatcagaagcatttagatagaattgtggccttgtttcctaaagatgtggaccgtctgagaaggatgtctctgatagaagaggaaggaagcaaaaggatcaacatggcccatctctgcattgtcggttcccatgctgtgaatggcgtggctaaaatccactcagacatcgtgaagactaaagtattcaaggacttcagtgagctagaacctgacaagtttcagaataaaaccaatgggatcactccaaggcgctggctcctactctgcaacccaggacttgcagagctcatagcagagaaaattggagaagactatgtgaaagacctgagccagctgacgaagctccacagcttcctgggtgatgatgtcttcctccgggaactcgccaaggtgaagcaggagaataagctgaagttttctcagttcctggagacggagtacaaagtgaagatcaacccatcctccatgtttgatgtccaggtgaagaggatacatgagtacaagcgacagctcttgaactgtctgcatgtgatcacgatgtacaaccgcattaagaaagaccctaagaagttattcgtgccaaggacagttatcattggtggtaaagctgccccaggatatcacatggccaaaatgatcataaagctgatcacttcagtggcagatgtggtgaacaatgaccctatggttggaagcaagttgaaagtcatcttcttggagaactacagagtatctcttgctgaaaaagtcattccagccacagatctgtcagagcagatttccactgcaggcaccgaagcctcggggacaggcaatatgaagttcatgctaaatggggccctaactatcgggaccatggatggggccaatgtggaaatggcagaagaagctggggaagagaacctgttcatctttggcatgaggatagatgatgtggctgctttggacaagaaagggtacgaggcaaaagaatactatgaggcacttccagagctgaagctggtcattgatcaaattgacaatggctttttttctcccaagcagcctgacctcttcaaagatatcatcaacatgctattttatcatgacaggtttaaagtctttgcagactacgaagcctatgtcaagtgtcaagataaagtgagtcagctgtacatgaatccaaaggcctggaacacaatggtactcaaaaacatagctgcctcggggaaattctccagtgaccgaacaattaaagaatatgcccaaaacatctggaacgtggaaccttcagatctaaagatttctctatccaatgaatctaacaaagtcaatggaaattgaactctacaatgtctctagaaaacatagcttcttactgaacttgaacat

SEQ ID NO: 331 - DNA, 5029 bp, Homo sapiens
ataaaaacctactgaccaaggttcgagatgctgccctgtggttggagaccttgtcagacagcagacctgccaaggcttccctctccaccacctcctccattgctgatttcttccttgccttaaccatctgcaactctgtcatggtgtccacaaccaccgagcccaggcagagggtcaccatcaaaccctcaagcaaggctctggggacgtccctggagaagattcagcagctcttccagaagttgaagctattgagcctcagccagtcattctcatccactgcaccctctgacacagacctcggggagagcttaggggccaacgtggccaccacagactcggatgagagagatgatgcatctgtgtgcagtggaggtgactccactgatgacggtggctacaggagcagcatgtgggaccagggcgacatcctggagtctgggtcaggcacttccttggaggaggcattggaggccccagccacagacctggccaggcctgagttctgttacgaggctgagagccctgatgaggccgccctggtgcacgctgcccatgcctacagcttcacactagtgtcccggacacctgagcaggtgactgtgcgcctgccccagggcacctgcctcaccttcagcctcctctgcaccctgggctttgactctgtcaggaagagaatgtctgtggttgtgaggcacccactgactggcgagattgttgtctacaccaagggtgctgactcggtcatcatggacctgctggaagacccagcctgcgtacctgacattaatatggaaaagaagctgagaaaaatccgagcccggacccaaaagcatctagacttgtatgcaagagatggcctgcgcacactatgcattgccaagaaggttgtaagcgaagaggacttccggagatgggccagtttccggcgtgaggctgaggcatccctcgacaaccgagatgagcttctcatggaaactgcacagcatctggagaatcaactcaccttacttggagccactgggatcgaagaccggctgcaggaaggagttccagatacgattgccactctgcgggaggctgggatccagctctgggtcctgactggagataagcaggagacagcggtcaacattgcccattcctgcagactgttaaatcagaccgacactgtttataccatcaatacagagaatcaggagacctgtgaatccatcctcaattgtgcattggaagagctaaagcaatttcgtgaactacagaagccagaccgcaagctctttggattccgcttaccttccaagacaccatccatcacctcagaagctgtggttccagaagctggattggtcatcgatgggaagacattgaatgccatcttccagggaaagctagagaagaagtttctggaattgacccagtattgtcggtccgtcctgtgctgccgctccacgccactccagaagagtatgatagtcaagctggtgcgagacaagttgcgcgtcatgaccctttccataggtgatggagcaaatgatgtaagcatgattcaagctgctgatattggaattggaatatctggacaggaaggcatgcaggctgtcatgtccagcgactttgccatcacccgctttaagcatctcaagaagttgctgctcgtgcatggccactggtgttactcgcgcctggccaggatggtggtgtactacctctacaagaacgtgtgctacgtcaacctgctcttctggtatcagttcttctgtggtttctccagctccaccatgattgattactggcagatgatattcttcaatctcttctttacctccttgcctcctcttgtctttggagtccttgacaaagacatctctgcagaaacactcctggcattgcctgagctatacaagagtggccagaactctgagtgctataacctgtcgactttctggatttctatggtggatgcattctaccagagcctcatctgtttctttatcccttacctggcctataagggctctgatatagatgtctttacctttgggacaccaatcaacaccatctccctcaccacaatccttttgcaccaggcaatggaaatgaagacatggaccattttccacggagtcgtgctcctcggcagcttcctgatgtactttctggtatccctcctgtacaatgccacctgcgtcatctgcaacagccccaccaatccctattgggtgatggaaggccagctctcaaaccccactttctacctcgtctgctttctcacaccagttgttgctcttctcccaagatactttttcctgtctctgcaaggaacttgtgggaagtctctaatctcaaaagctcagaaaattgacaaactccccccagacaaaagaaacctggaaatccagagttggagaagcagacagaggcctgcccctgtccccgaagtggctcgaccaactcaccacccagtgtcatctatcacaggacaggacttcagtgccagcaccccaaagagctctaaccctcccaagaggaagcatgtggaagagtcagtactccacgaacagagatgtggcacggagtgcatgagggatgactcatgctcaggggactcctcagctcaactctcatccggggagcacctgctgggacctaacaggataatggcctactcaagaggacagactgatatgtgccggtgctcaaagaggagcagccatcgccgatcccagagttcactgaccatatgaggagctgcagaaatctgtacaaactcaacagaggccacctagtcactggtccacataacccttgaccccttcttcttcatagaggaaacaatgtgccagtcttattcttttcttcaacaaccttgacttccatggaggaagtgctggccccaaggggtctgacacaaagacgggaaacccagtcggcctctagttttctgctgctctcaggcagcacatcttgcaaacagtttggagaaggaggctgtttttgttgaatcgagttctcaaatcggtttagaccaaagccattcttctgaccctctagataagcgtagcctacaacccagtgccgtaagtttccaagattcaagaagtgtatcaacccaggcaatatctcaggatatggaagtttctgggtttatttacccctcagtgcccagagttaaagtttcagaagagacttgtgcacataagggcttcatctcaagtgtattgcagtaatggctgaatcggggttaacatcccttccaggcacagcgagttggttctgctttttgcctgtaagccaaagaaaagccacatctaaaaagctactactaaaagccagaaagaaaagtggatttgaactcagtgtcacagactcttctgagtgttttagggtcacagctagtgtaagaggcatgaagaatagacatgcaaaagggaacgggtgcaccagagacccctgttttggctgacagaccatatgtcccaccagctggggaatctgacaagaggacataggtggcactctttttttaaagctatttattgtatctatttttaaataaaattgcccatcctcattcagctcttagaacaaaagcaaaaaaccctgtaaatcaggagatataagcacatctgcacccagaataggcccatatgatagggcaaccctgagcttaaacaatgacatcttcaagggtagaactaatctgaaacccccttccagcctctggaagacactggcctgcatcagttagagtcagagcaagtgtcacttcacagggaaaagaaggattatatagacttcctatccctagagtttataaatgtcaactatataaaaaaagctcaaaacagtgttaaaggaatgaacagtagaattttaataggctgtccaaagaagccaggtctgctgtgggcaagtatagcctaaccctagtcttgtaaaataagccagaaagggttactgagccaccttaagctagtacctatatagtaggcaaaaagtacagaaatagatgcaataagtgtggtgagtctttgagcctacgagtcatgccaccagccataagttgacctatcacttgagaacctcctcagcaaagatgccagaaaacattcaatcaagttggcaaatgacacagggagctggccctctgaccatcttcctggcaaacctggactggaagggccatttgcagcactgtcctggagctaatacactgtttcactgcctctgccatataatgatgccagcactagccagctggtgggtatttggaggaatcctgcatgaggattgcccaataaggggcaggtacacatacctggcaaagtgatgatgatgtgaattgtttccagtgaggggattgagtcaaaacttggatctcaggtacctcaatttttcccccaatttctggctactactaaaagccagaaagaacagaacagtggcctcaggagatctgagtttgaatccttgctctctaggatgcaggtggcttgaagcagaatgccacacctgcaagttgattagaactgcctttcttcccaggcttgacataggtattaagtcaaaattacatgaaacccagtggtaaaaaagcctctgaaagctgtaacaccctcagtaataacaaaagggatttttatttcacagctaaagggaaaataggtggagaagttaaaaaataatgtctgatcctgttcctaagttccaaactatagccaacactctgatgctgctctttttcttgtaggaccaaccgtcccagtttgcctgggactttctcatttttacagagtcccaaatcctaggaaactggagcaactggtacaactggtcacctactcttgcccctctgtaaatcaagccaactgtgaccatccaatgtgccatcttacagggaaaagttataaccactattcccctataacataatgctaatgattgtacttagtacatttttatacttttatgatattttactgattggaaatgtcatcctttattaaaaataaacatggttttccat

SEQ ID NO: 332 - DNA, 1932 bp, Homo sapiens
cagcgagccgcagcgcaatcccggcgctcgcccaaggaccctggaagctaccgttaccccgccggcagcgtgggcgccatgagcagctcgggactgaattcggagaaggtagctgctctgatacagaaactgaattccgacccccagttcgtacttgcccagaatgtcgggaccacccacgacctgctggacatctgtctgaagcgggccacggtgcagcgcgcgcagcatgtgttccagcacgccgtgccccaggagggcaagccaatcaccaaccagaagagctcagggcgatgctggatcttttcttgtctgaatgttatgaggcttccattcatgaaaaagttaaatattgaagaatttgagtttagccaatcttacctgtttttttgggacaaggttgaacgctgttatttcttcttgagtgcttttgtggacacagcccagagaaaggagcctgaggatgggaggctggtgcagtttttgcttatgaaccctgcaaatgatggtggccaatgggatatgcttgttaatattgttgaaaaatatggtgttatccctaagaaatgcttccctgaatcttatacaacagaggcaaccagaaggatgaatgatattctgaatcacaagatgagagaattctgtatacgactgcggaacctggtacacagtggagcaaccaaaggagaaatctcggccacacaggacgtcatgatggaggagatattccgagtggtgtgcatctgtttgggtaatccaccagagacattcacctgggaatatcgagacaaagataaaaattatcagaaaattggccccataacacccttggagttttacagggaacatgtcaagccactcttcaatatggaagataagatttgtttagtgaatgaccctaggccccagcacaagtacaacaaactttacacagtggaatacttaagcaatatggttggtgggagaaaaactctatacaacaaccagcccattgacttcctgaaaaagatggttgctgcctccatcaaagatggagaggctgtgtggtttggctgtgatgttggaaaacacttcaatagcaagctgggcctcagtgacatgaatctctatgaccatgagttagtgtttggtgtctccttgaagaacatgaataaagcggagaggctgacttttggtgagtcacttatgacccacgccatgaccttcactgctgtctcagagaaggatgatcaggatggtgctttcacaaaatggagagtggagaattcatggggtgaagaccatggccacaaaggttacctgtgcatgacagatgagtggttctctgagtatgtctacgaagtggtggtggacaggaagcatgtccctgaagaggtgctagctgtgttagagcaggaacccattatcctgccagcatgggaccccatgggagctttggctgagtgatactgccctccagctctttcctccttccatggaacctgacgtagctgcaaaggacagatccagggactgaagccaaagttatgcaagggactgtgtgttgccacaggacacagtcagatttccagtctccaccaggaacctcttcagaaagtgtgctttatgctgaaacagaatactgttaaaggaaaaaaaagaggggggaagatcaggtcatactatctactctcctcatctctaacagctcaggatctcttagcattttaattagatgtaattgtttgtctttaactgtcaaaaagtttggttctgtgtctgtgttttaataagacgagaggacgagcgattgaggtgtatggagagaaaacagacctaatgctccttgttcctagagtagagtggagggagggtggcctaagagttgagctctcggaactgcatgctgctggacagtatcactgtctttcctagatggcagtcactgaattc

SEQ ID NO: 333 - DNA, 2617 bp, Homo sapiens
cacgagttggtttgggagctgccagtctcctgggaggatcgcagtcagcagagcagggctgaggcctgggggtaggagcagagcctgcgcatctggaggcagcatgtccaagaaagggagtggaggtgcagcgaaggacccaggggcagagcccacgctggggatggaccccttcgaggacacactgcggcggctgcgtgaggccttcaactgagggcgcacgcggccggccgagttccgggctgcgcagctccagggcctgggccacttccttcaagaaaacaagcagcttctgcgcgacgtgctggcccaggacctgcataagccagctttcgaggcagacatatctgagctcatcctttgccagaacgaggttgactacgctctcaagaaccttcaggcctggatgaaggatgaaccacggtccacgaacctgttcatgaagctggactcggtcttcatctggaaggaaccctttggcctggtcctcatcatcgcaccctggaactacccattgaacctgaccctggtgctcctggtgggcaccctccccgcagggaattgcgtggtgctgaagccgtcagaaatcagccagggcacagagaaggtcctggctgaggtgctgccccagtacctggaccagagctgctttgccgtggtgctgggcggaccccaggagacagggcagctgctagagcacaagttggactacatcttcttcacagggagccctcgtgtgggcaagattgtcatgactgctgccaccaagcacctgacgcctgtcaccctggagctggggggcaagaacccctgctacgtggacgacaactgcgacccccagaccgtggccaaccgcgtggcctggttctgctacttcaatgccggccagacctgcgtggcccctgactacgtcctgtgcagccccgagatgcaggagaggctgctgcccgccctgcagagcaccatcacccgtttctatggcgacgacccccagagctccccaaacctgggccgcatcatcaaccagaaacagttccagcggctgcgggcattgctgggctgcggccgcgtggccattgggggccagagcaacgagagcgatcgctacatcgcccccacggtgctggtggacgtgcaggagacggagcctgtgatgcaggaggagatcttcgggcccatcctgcccatcgtgaacgtgcagagcgtggacgaggccatcaagttcatcaaccggcaggagaagcccctggccctgtacgccttctccaacagcagacaggttgtgaaccagatgctggagcggaccagcagcggcagctttggaggcaatgagggcttcacctacatatctctgctgtccgtgccattcgggggagtcggccacagtgggatgggccggtaccacggcaagttcaccttcgacaccttctcccaccaccgcacctgcctgctcgccccctccggcctggagaaattaaaggagatccgctacccaccctataccgactggaaccagcagctgttacgctggggcatgggctcccagagctgcaccctcctgtgagcgtcccacccgcctccaacgggtcacacagagaaacctgagtctagccatgaggggcttatgctcccaactcacattgttcctccagaccgcaggctcccccagcctcaggttgctggagctgtcacatgactgcatcctgcctgccagggctgcaaagcaaggtcttgcttctatctgggggacgctgctcgagagaggccgagaggccgcagaacatgccaggtgtcctcactcaccccaccctccccaattccagccctttgccctctcggtcagggttggccaggcccagtcacaggggcagtgtcaccctggaaaatacagtgccctgccttcttaggggcatcagccctgaacggttgagagcgtggagccctccaggcctttgctctcccctctaggcacacgcgcacttccacctctgccccatcccaactgcaccagcactgcctcccccagggatcctctcacatcccacactggtctctgcaccacccctctggttcacaccgcaccctgcactcacccacagcagctccatccactgggaaaactggggtttgcatcactccactgcacagtgttagtgggacctgggggcaagtcccttgacttctctgagcctcagtttccttatgtgaaagttgctggaaccaaaatggagtcacttatgccaaactctaataaaatggagtcgggggggcacatagaagccctcacacacacatgcccgtaacaggatttatcaccaagacacgcctgcatgtaagaccagacacagggcgtatggaaaagcacgtcctcaaagactgtagtattccagatgagctgcagatgcttacctaccacggccgtctccaccagaaaaccatcgccaactcctgcgatcagcttgtgacttacaaaccttgtttaaaagctgcttacatggacttctgtcctttaaaacgttccccttggctgtggccctctgtgtatgcctgggatccttccaagcactcatagcccagataggaatcctctgctcctcccaaataaattcatctgttc

SEQ ID NO: 334 - DNA, 1238 bp, Homo sapiens
agactgaggttagaaggcacaggtggcgagatgagccgggtaccagcgttcctgagcgcggccgaggtggaggaacacctccgcagctccagcctcctcatcccgcctctagagacggccctggccaacttctccagcggtcccgaaggaggggtcatgcagcccgtgcgcaccgtggtgccggtgaccaagcacaggggctacctgggggtcatgcccgcctacagtgctgcagaggatgcactgaccaccaagttggtcaccttctacgaggaccgcggcatcacctcggtcgtcccttcccaccaggctactgtgctactctttgagcccagcaatggcaccctgctggcggtcatggatggaaatgtcataactgcaaagagaacagctgcagtttctgccattgccaccaagtttctgaaacctcccagcagtgaagtgctgtgcatccttggggctggggtccaggcctacagccattatgagatcttcacagagcagttctcctttaaggaggtgaggatatggaaccgcaccaaagaaaatgcagagaagtttgcagacacagtgcaaggagaggtacgggtctgttcttcggtccaggaggctgtggcaggtgcagatgtgatcatcacagtcaccctggcaacagagcccattttgtttggtgaatgggtgaagccaggggctcacatcaatgctgttggagccagcagacctgactggagagaactggatgatgagctcatgaaagaagctgtgctgtacgtggattcccaggaggctgccctgaaggagtctggagatgtcctgctgtcaggggccgagatctttgctgagctgggagaagtgattaagggagtgaaaccagcccactgtgagaagaccacggtgttcaagtctttgggaatggcagtggaagacacagttgcagccaaactcatctatgattcctggtcatctggtaaataaaacaaaggaacttgatgttgagatggatgcttgaggaatattgctgctggttctcataatttctagagtaaatgagggagtccagtccccagtgaactctccttttgtgcttatcatgttttaccttaaatgctgagatcctcatttatgtttgtagttggaaagcaaagctaggtagccatttcttctgttctaccaagttataatagcattcatttccctttatatttccctgaaataaagcacattccaattgtgcagtg

SEQ ID NO: 335 - DNA, 1856 bp, Homo sapiens
ctgacttggcaggactgtgcaattgtcagaaggccgtggggagtgggggccagtgcctgcagcctgccctgcctctctcacaggcccttagagcatcgccaggtgcagagctccacagctctctttcccaaggagtaatcagagggtgagaacgtggagcctggtggacaggtgaaagcactgggatctttctgcccagaaaggggaaagttgcacatttatatcctagagggaagcgacagcagtgcttctccctgtgctgaggtacaggagccatgtggctagaaatcctcctcacttcagtgctgggctttgccatctactggttcatctcccgggacaaagaggaaactttgccacttgaagatgggtggtgggggccaggcacgaggtccgcagccagggaggacgacagcatccgccctttcaaggtggaaacgtcagatgaggagatccacgacttacaccagaggatcgataagttccgtttcaccccacctttggaggacagctgcttccactatggcttcaactccaactacctgaagaaagtcatctcctactggcggaatgaatttgactggaagaagcaggtggagattctcaacagataccctcacttcaagactaagattgaagggctggacatccacttcatccacgtgaagcccccccagctgcccgcaggccataccccgaagcccttgctgatggtgcacggctggcccggctctttctacgagttttataagatcatcccactcctgactgaccccaagaaccatggcctgagcgatgagcacgtttttgaagtcatctgcccttccatccctggctatggcttctcagaggcatcctccaagaaggggttcaactcggtggccaccgccaggatcttttacaagctgatgctgcggctgggcttccaggaattctacattcaaggaggggactgggggtccctgatctgcactaatatggcccagctggtgcccagccacgtgaaaggcctgcacttgaacatggctttggttttaagcaacttctctaccctgaccctcctcctgggacagcgtttcgggaggtttcttggcctcactgagagggatgtggagctgctgtaccccgtcaaggagaaggtattctacagcctgatgagggagagcggctacatgcacatccagtgcaccaagcctgacaccgtaggctctgctctgaatgactctcctgtgggtctggctgcctatattctagagaagttttccacctggaccaatacggaattccgatacctggaggatggaggcctggaaaggaagttctccctggacgacctgctgaccaacgtcatgctctactggacaacaggcaccatcatctcctcccagcgcttctacaaggagaacctgggacagggctggatgacccagaagcatgagcggatgaaggtctatgtgcccactggcttctctgccttcccttttgagctattgcacacgcctgaaaagtgggtgaggttcaagtacccaaagctcatctcctattcctacatggttcgtgggggccactttgcggcctttgaggagccggagctgctcgcccaggacatccgcaagttcctgtcggtgctggagcggcaatgacccacccctctccccccgcctgccacctccccccacaagtgccctccaggcttttcttggggaagataccccttttctgaggaatgagtttgcctccgtcccctgcccatgctgggagcccacgctcaccccctcacccctccaagctcactccccaacccccaactccgtgtggtaagcaacatggctttgatgataaacgactttactcta

SEQ ID NO: 336 - DNA, 3321 bp, Homo sapiens
atgaagattttgatacttggtatttttctgtttttatgtagtaccccagcctgggcgaaagaaaagcattattacattggaattattgaaacgacttgggattatgcctctgaccatggggaaaagaaacttatttctgttgacacggaacattccaatatctatcttcaaaatggcccagatagaattgggagactatataagaaggccctttatcttcagtacacagatgaaacctttaggacaactatagaaaaaccggtctggcttgggtttttaggccctattatcaaagctgaaactggagataaagtttatgtacacttaaaaaaccttgcctctaggccctacacctttcattcacatggaataacttactataaggaacatgagggggccatctaccctgataacaccacagattttcaaagagcagatgacaaagtatatccaggagagcagtatacatacatgttgcttgccactgaagaacaaagtcctggggaaggagatggcaattgtgtgactaggatttaccattcccacattgatgctccaaaagatattgcctcaggactcatcggacctttaataatctgtaaaaaagattctctagataaagaaaaagaaaaacatattgaccgagaatttgtggtgatgttttctgtggtggatgaaaatttcagctggtacctagaagacaacattaaaacctactgctcagaaccagagaaagttgacaaagacaacgaagacttccaggagagtaacagaatgtattctgtgaatggatacacttttggaagtctcccaggactctccatgtgtgctgaagacagagtaaaatggtacctttttggtatgggtaatgaagttgatgtgcacgcagctttctttcacgggcaagcactgactaacaagaactaccgtattgacacaatcaacctctttcctgctaccctgtttgatgcttatatggtggcccagaaccctggagaatggatgctcagctgtcagaatctaaaccatctgaaagccggtttgcaagcctttttccaggtccaggagtgtaacaagtcttcatcaaaggataatatccgtgggaagcatgttagacactactacattgccgctgaggaaatcatctggaactatgctccctctggtatagacatcttcactaaagaaaacttaacagcacctggaagtgactcagcggtgttttttgaacaaggtaccacaagaattggaggctcttataaaaagctggtttatcgtgagtacacagatgcctccttcacaaatcgaaaggagagaggccctgaagaagagcatcttggcatcctgggtcctgtcatttgggcagaggtgggagacaccatcagagtaaccttccataacaaaggagcatatcccctcagtattgagccgattggggtgagattcaataagaacaacgagggcacatactattccccaaattacaacccccagagcagaagtgtgcctccttcagcctcccatgtggcacccacagaaacattcacctatgaatggactgtccccaaagaagtaggacccactaatgcagatcctgtgtgtctagctaagatgtattattctgctgtggatcccactaaagatatattcactgggcttattgggccaatgaaaatatgcaagaaaggaagtttacatgcaaatgggagacagaaagatgtagacaaggaattctatttgtttcctacagtatttgatgagaatgagagtttactcctggaagataatattagaatgtttacaactgcacctgatcaggtggataaggaagatgaagactttcaggaatctaataaaatgcactccatgaatggattcatgtatgggaatcagccgggtctcactatgtgcaaaggagattcggtcgtgtggtacttattcagcgccggaaatgaggccgatgtacatggaatatacttttcaggaaacacatatctgtggagaggagaacggagagacacagcaaacctcttccctcaaacaagtcttacgctccacatgtggcctgacacagaggggacttttaatgttgaatgccttacaactgatcattacacaggcggcatgaagcaaaaatatactgtgaaccaatgcaggcggcagtctgaggattccaccttctacctgggagagaggacatactatatcgcagcagtggaggtggaatgggattattccccacaaagggagtgggaaaaggagctgcatcatttacaagagcagaatgtttcaaatgcatttttagataagggagagttttacataggctcaaagtacaagaaagttgtgtatcggcagtatactgatagcacattccgtgttccagtggagagaaaagctgaagaagaacatctgggaattctaggtccacaacttcatgcagatgttggagacaaagtcaaaattatctttaaaaacatggccacaaggccctactcaatacatgcccatggggtacaaacagagagttctacagttactccaacattaccaggtgaaactctcacttacgtatggaaaatcccagaaagatctggagctggaacagaggattctgcttgtattccatgggcttattattcaactgtggatcaagttaaggacctctacagtggattaattggccccctgattgtttgtcgaagaccttacttgaaagtattcaatcccagaaggaagctggaatttgcccttctgtttctagtttttgatgagaatgaatcttggtacttagatgacaacatcaaaacatactctgatcaccccgagaaagtaaacaaagatgatgaggaattcatagaaagcaataaaatgcatgctattaatggaagaatgtttggaaacctacaaggcctcacaatgcacgtgggagatgaagtcaactggtatctgatgggaatgggcaatgaaatagacttacacactgtacattttcacggccatagcttccaatacaagcacaggggagtttatagttctgatgtctttgacattttccctggaacataccaaaccctagaaatgtttccaagaacacctggaatttggttactccactgccatgtgaccgaccacattcatgctggaatggaaaccacttacaccgttctacaaaatgaagacaccaaatctggctgaatgaaataaattggtgataagtggaaaaaagagaaaaaccaatgattcataacaatgtatgtgaaagtgtaaaatagaatgttactttggaatgactataaacattaaaagagactggagcat

SEQ ID NO: 337 - DNA, 2662 bp, Homo sapiens
gtctacaccagcggtgtcgctgcccgaaagtgagagaaggctgatattgctagctggaatccaggcctgggtgctgcatggtggcgcccctccccgtgaccaccgctgcgttttctcgggctttctctgaggagctgctcttgtgctgtttggcccctgcctactcggaatggaacaaagcatcgaacaaacaactgagatcctgttgtgcctatcacctgttgaagttgccagtcttaaggaaggaatcaatttctttcgcaataagagcactggcaaagactacgtcttgtacaagaataagagccgactgagggcatgcaagaatatgtgcaagcaccaaggaggcctgttcataaaagatatcgaggatttagccggaagttgttgaaatggatgaaaacaacggacttttgcttttagaactgaatcctcctaacccttgggacttacagcccagatctcctgaagagttggcttttggagaagtacagataacatatctcactcatgcctgcatggacctcaagttaggagacaagagaatggtgtttgacccttggttaatcggtcctgcttttgcccgtggatggtggttgctccatgagcctccatctgattggctggagaggctgtgccaggcagacctcatttacatcagtcatctgcactcagaccacctgagttaccccacactgaaaaagcttgctgggagaagaccagatattcccatttatgttggaaacacagaaaggcctgtattttggaatctgaatcagagcggtgtccagttgactaatatcaatgtcgtgccatttggaatatggcagcaggtggacaaaaatcttcgattcatgatcttgatggacggtgttcatcctgagatggacacttgcattattgtggagtacaaaggtcataaaatactcaatatagtagactgcaccagacccaatgggggaaggctgcctatgaaggttgctctaatgatgagtgattttgctggaggagcatcaggctttccaatgactttcagtggtggaaaatttacggaggaatggaaagcccaattcattaaaacagaaaggaagaagctcctgaactacaaggctcggctggtgaagaacctgcaaccccgaatttattgtccctttgctgggtattttgtggaatctcacccatcagacaagtacatcaaggaaacaaacaccaaaaatgacccaaatgaactcaacaatcttatcaagaaaaactctgatgtgataacatggacccctcgaccgggagccacccttgatctgggaagaatgctgaaggatcgaacagacagcaagggcatcatagagcctccagaggggacaaaaatttacaaggattcctgggattttgaaccttatttggaaatcttgaatgctgctctaggagatgaaatatttcttcactcatcctggataaaagaatacttcacttgggctggatttaaagattacaaccttgtggtcaggatgattgagacagatgaggacttcaatccttttcctggaggatatgactatttggttgactttttagatttatccttcccaaaagaaagaccacaacgagaacatccctatgaggaaatccatagccgggtggatgtcatcagacacgtggtgaagaatggtctactctgggatgagttgtatataggattccaaacacggctccagcgggatcctgacatataccatcacctgttttggaatcattttcaaataaaactccccctcacaccacccaactggaagtcattcctgatgtgctgtgagcagaatgggcctgcgattttgcaagaatgcaaaaccacatgaaaatttcaagaattcactgatctgatgcaaaataaaaatttatcattacatcttgaacccaggaagcttacagcaaagagactatgctttatgacgtcagcaatagataattccacgttgcctttgtgatttgtatatatagcttacatttgtggatcactacatagccagattcaaaaatattttacttgttccatccacagttctctacagaaagaaccaatgaacccaataggaacaaattctctgtggaaaacaaagcatagctgtagtagatacgaatccaatcacagaggaaacaggaagagaaaaacatccaagactacagtgaaaactggaaatggtctgttttcgtgatattcgtatgattaagatgcaaattttttcttaggaaaatgtgattgttaactagcattctgttttacatgttgacatttctaacacacacaccactgatttgaacttcaaaatttattttctgattatatatgctaggtctgattctgaagatacaagaattcaatggtggaatttgtctcctgaaatttctagattcataattagaagtgtttattaccaacttctcacttagattaacatcagtgatgtttgattattctggttaaccgctcacatgcataacaataatgctagaaattcaggaattataattttgtgatttatactgtgtggtaaattattcagttctcactgcaaataaatataatgtatatcaatgtaatgtaggtcagaatgtctatggtgagcaaataaaagattattttaaaatatgaaaaaaaaaaaaaaaa

SEQ ID NO: 338 - DNA, 3635 bp, Homo sapiens
tcaacacaggacaatgcaagcccatgagctgttccggtattttcgaatgccagagctggttgacttccgacagtacgtgcgtactcttccgaccaacacgcttatgggcttcggagcttttgcagcactcaccaccttctggtacgccacgagacccaaacccctgaagccgccatgcgacctctccatgcagtcagtggaagtggcgggtagtggtggtgcacgaagatccgcactacttgacagcgacgagcccttggtgtatttctatgatgatgtcacaacattatacgaaggtttccagaggggaatacaggtgtcaaataatggcccttgtttaggctctcggaaaccagaccaaccctatgaatggctttcatataaacaggttgcagaattgtcggagtgcataggctcagcactgatccagaagggcttcaagactgccccagatcagttcattggcatctttgctcaaaatagacctgagtgggtgattattgaacaaggatgctttgcttattcgatggtgatcgttccactttatgatacccttggaaatgaagccatcacgtacatagtcaacaaagctgaactctctctggtttttgttgacaagccagagaaggccaaactcttattagagggtgtagaaaataagttaataccaggccttaaaatcatagttgtcatggatgcctacggcagtgaactggtggaacgaggccagaggtgtggggtggaagtcaccagcatgaaggcgatggaggacctgggaagagccaacagacggaagcccaagcctccagcacctgaagatcttgcagtaatttgtttcacaagtggaactacaggcaaccccaaaggagcaatggtcactcaccgaaacatagtgagcgattgttcagcttttgtgaaagcaacagagaatacagtcaatccttgcccagatgatactttgatatctttcttgcctctcgcccatatgtttgagagagttgtagagtgtgtaatgctgtgtcatggagctaaaatcggatttttccaaggagatatcaggctgctcatggatgacctcaaggtgcttcaacccactgtcttccccgtggttccaagactgctgaaccggatgtttgaccgaattttcggacaagcaaacaccacgctgaagcgatggctcttggactttgcctccaagaggaaagaagcagagcttcgcagcggcatcatcagaaacaacagcctgtgggaccggctgatcttccacaaagtacagtcgagcctgggcggaagagtccggctgatggtgacaggagccgccccggtgtctgccactgtgctgacgttcctcagagcagccctgggctgtcagttttatgaaggatacggacagacagagtgcactgccgggtgctgcctaaccatgcctggagactggaccgcaggccatgttggggccccgatgccgtgcaatttgataaaacttgttgatgtggaagaaatgaattacatggctgccgagggcgagggcgaggtgtgtgtgaaagggccaaatgtatttcagggctacttgaaggacccagcgaaaacagcagaagctttggacaaagacggctggttacacacaggggacattggaaaatggttaccaaatggcaccttgaaaattatcgaccggaaaaagcacatatttaagctggcacaaggagaatacatagcccctgaaaagattgaaaatatctacatgcgaagtgagcctgttgctcaggtgtttgtccacggagaaagcctgcaggcatttctcattgcaattgtggtaccagatgttgagacattatgttcctgggcccaaaagagaggatttgaagggtcgtttgaggaactgtgcagaaataaggatgtcaaaaaagctatcctcgaagatatggtgagacttgggaaggattctggtctgaaaccatttgaacaggtcaaaggcatcacattgcaccctgaattattttctatcgacaatggccttctgactccaacaatgaaggcgaaaaggccagagctgcggaactatttcaggtcgcagatagatgacctctattccactatcaaggtttagtgtgaagaagaaagctcagaggaaatggcacagttccacaatctcttctcctgctgatggccttcatgttgttaattttgaatacagcaagtgtagggaaggaagcgttcgtgtttgacttgtccattcggggttcttctcataggaatgctagaggaaacagaacaccgccttacagtcacctcatgttgcagaccatgtttatggtaatacacactttccaaaatgagccttaaaaattgtaaaggggatactataaatgtgctaagttatttgagacttcctcagtttaaaaagtgggttttaaatcttctgtctccctgcttttctaatcaaggggttaggactttgctatctctgagatgtctgctacttgctgcaaattctgcagctgtctgctgctctaaagagtacagtgcactagagggaagtgttccctttaaaaataagaacaactgtcctggctggagaatctcacaagcggaccagagatctttttaaatccctgctactgtcccttctcacaggcattcacagaacccttctgattcgtaagggttacgaaactcatgttcttctccagtcccctgtggtttctgttggagcataaggtttccagtaagcgggagggcagatccaactcagaaccatgcagataaggagcctctggcaaatgggtgctcatcagaacgcgtggattctctttcatggcagaatgctcttggactcggttctccaggcctgattccccgactccatcctttttcaggggttatttaaaaatctgccttagattctatagtgaagacaagcatttcaagaaagagttacctggatcagccatgctcagctgtgacgcctgaataactgtctactttatcttcactgaaccactcactctgtgtaaaggccaacagatttttaatgtggttttcatatcaaaagatcatgttgggattaacttgcctttttccccaaaaaataaactctcaggcaagcatttctttaaagctattaagggagtatatacttgagtacttattgaaatggacagtaataagcaaatgttcttataatgctacctgatttctatgaaatgtgtttgacaagccaaaattctaggatgtagaaatctggaaagttcatttcctgggattcacttctccagggattttttaaagttaatttgggaaattaacagcagttcactttattgtgagtctttgccacatttgactgaattgagctgtcatttgtacatttaaagcagctgttttggggtctgtgagagtacatgtattatatacaagcacaacagggcttgcactaaagaattgtcattgtaataacactacttggtagcctaacttcatatatgtattcttaattgcacaaaaagtcaataatttgtcaccttggggttttgaatgtttgctttaagtgttggctatttctatgttttataaaccaaaacaaaatttccaaaaacaatgaaggaaaccaaaataaatatttctgcatttcg

SEQ ID NO: 339 - DNA, 3137 bp, Homo sapiens
gcggagcgtgtgagcagtactgcggcctcctctcctctcctaacctcgctctcgcggcctacctttacccgcccgcctgctcggcgaccagcggggatcctcccccagccgcaagtccacgaagaaagcaacgaatgaaaattatgaagacaacgagaagtcagactcctccgggtcgcgctccagctgcttcggcttcgtcgcctactctgtgaactccggggagagatctcgagtcaagattaagaccttaacccaccaacctgcctgttcggacaccccccgggccggccgctgtctgtccccttctccatcgccctctcccagaaagctccggtgcttggaccagctagagtctgagaaagaggagaggcgcgaacgccactccaaaaagagaagggttaaagagggcaaccctaacgatacgcttgactttctgtggctgggaacaccttccaccatgaccacctcagcaagttcccacttaaataaaggcatcaagcaggtgtacatgtccctgcctcagggtgagaaagtccaggccatgtatatctggatcgatggtactggagaaggactgcgctgcaagacccggaccctggacagtgagcccaagtgtgtggaagagttgcctgagtggaatttcgatggctccagtactttacagtctgagggttccaacagtgacatgtatctcgtgcctgctgccatgtttcgggaccccttccgtaaggaccctaacaagctggtgttatgtgaagttttcaagtacaatcgaaggcctgcagagaccaatttgaggcacacctgtaaacggataatggacatggtgagcaaccagcacccctggtttggcatggagcaggagtataccctcatggggacagatgggcacccctttggttggccttccaacggcttcccagggccccagggtccatattactgtggtgtgggagcagacagagcctatggcagggacatcgtggaggcccattaccgggcctgcttgtatgctggagtcaagattgcggggactaatgccgaggtcatgcctgcccagtgggaatttcagattggaccttgtgaaggaatcagcatgggagatcatctctgggtggcccgtttcatcttgcatcgtgtgtgtgaagactttggagtgatagcaacctttgatcctaagcccattcctgggaactggaatggtgcaggctgccataccaacttcagcaccaaggccatgcgggaggagaatggtctgaagtacatcgaggaggccattgagaaactaagcaagcggcaccagtaccacatccgtgcctatgatcccaagggaggcctggacaatgcccgacgtctaactggattccatgaaacctccaacatcaacgacttttctgctggtgtagccaatcgtagcgccagcatacgcattccccggactgttggccaggagaagaagggttactttgaagatcgtcgcccctctgccaactgcgaccccttttcggtgacagaagccctcatccgcacgtgtcttctcaatgaaaccggcgatgagcccttccagtacaaaaattaagtggactagacctccagctgttgagcccctcctagttcttcatcccactccaactcttccccctctcccagttgtcccgattgtaactcaaagggtggaatatcaaggtcgtttttttcattccatgtgcccagttaatcttgctttctttgtttggctgggatagaggggtcaagttattaatttcttcacacctaccctcctttttttccctatcactgaagctttttagtgcattagtggggaggagggtggggagacataaccactgcttccatttaatggggtgcacctgtccaataggcgtagctatccggacagagcacgtttgcagaagggggactcttcttccaggtagctgaaaggggaagacctgacgtactctggttaggttaggacttgccctcgtggtggaaacttttcttaaaaagttataaccaacttttctattaaaagtgggaattaggagagaaggtaggggttgggaatcagagagaatggctttggtctcttgcttgtgggactagcctggcttgggactaaatgccctgctctgaacacgaagcttagtataaactgatggatatccctaccttgaaagaagaaaaggttcttactgcttggtccttgatttatcacacaaagcagaatagtatttttatatttaaatgtaaagacaaaaaactatatgtatggttttgtggattatgtgtgttttgctaaaggaaaaaaccatccaggtcacggggcaccaaatttgagacaaatagtcggattagaaataaagcatctcattttgagtagagagcaagggaagtggttcttagatggtgatctgggattaggccctcaagacccttttgggtttctgccctgcccaccctctggagaaggtgggcactggattagttaacagacgacacgttactagcagtcacttgatctccgtggctttggtttaaaagacacacttgtccacataggtttagagataagagttggctgttcaacttgagcatgttactgacagagggggtattggggttattttctggtaggaatagcatgtcactaaagcaggccttttgatattaaattttttaaaaagcaaaattatagaagtttagattttaatcaaatttgtagggtttctaggtaatttttacagaattgcttgtttgcttcaactgtctcctacctctgctcttggaggagatggggacagggctggagtcaaaacacttgtaattttgtatcttgatgtctttgttaagactgctgaagaattattttttttcttttataataaggaataaaccccacctttattccttcatttcatctaccattttctggttcttgtgttggctgtggcaggccagctgtggttttcttttgccatgacaacttctaattgccatgtacagtatgttcaaagtcaaataactcctcattgtaaacaaactgtgtaactgcccaaagcagcacttataaatcagcctaacataaaaaaaaaaaaaaaaaaaaaaaaaaaaaaaaaaaaaaaaaaaaaaaa

SEQ ID NO: 340 - DNA, 1913 bp, Homo sapiens
tttctctttcaaactgcccagacggttggacaggacgtagacacacagaagaaaagaagacaaagaacgggtaggaaaattaaaaaggttaccatggggaagaaagtggccatcattggagctggtgtgagtggcttggcctccatcaggagctgtctggaagaggggctggagcccacctgctttgagaagagcaatgacattgggggcctgtggaaattctcagaccatgcagaggagggcagggctagcatttacaaatcagtcttttccaactcttccaaagagatgatgtgtttcccagacttcccatttcccgatgacttccccaactttatgcacaacagcaagatccaggaatatatcattgcatttgccaaagaaaagaacctcctgaagtacatacaatttaagacatttgtatccagtgtaaataaacatcctgattttgcaactactggccagtgggatgttaccactgaaagggatggtaaaaaagaatcggctgtctttgatgctgtaatggtttgttccggacatcatgtgtatcccaacctaccaaaagagtcctttccaggactaaaccactttaaaggcaaatgcttccacagcagggactataaagaaccaggtgtattcaatggaaagcgtgtcctggtggttggcctggggaattcgggctgtgatattgccacagaactcagccgcacagcagaacaggtcatgatcagttccagaagtggctcctgggtgatgagccgggtctgggacaatggttatccttgggacatgctgctcgtcactcgattcggaaccttcctcaagaacaatttaccgacagccatctctgactggttgtacgtgaagcagatgaatgcaagattcaagcatgaaaactatggcttgatgcctttaaatggagtcctgaggaaagagcctgtatttaacgatgagctcccagcaagcattctgtgtggcattgtgtccgtaaagcctaacgtgaaggaattcacagagacctcggccatttttgaggatgggaccatatttgagggcattgactgtgtaatctttgcaacagggtatagttttgcctaccccttccttgatgagtctatcatcaaaagcagaaacaatgagatcattttatttaaaggagtatttcctcctctacttgagaagtcaaccatagcagtgattggctttgtccagtcccttggggctgccattcccacagttgacctccagtcccgctgggcagcacaagtaataaagggaacttgtactttgccttctatggaagacatgatgaatgatattaatgagaaaatggagaaaaagcgcaaatggtttggcaaaagcgagaccatacagacagattacattgtttatatggatgaactctcctccttcattggggcaaagcccaacatcccatggctgtttctcacagatcccaaattggccatggaagtttattttggcccttgtagtccctaccagtttaggctggtgggcccagggcagtggccaggagccagaaatgccatgctgacccagtgggaccggtcgttgaaacccatgcagacacgagtggtcgggagacttcagaagccttgcttctttttccattggctgaagctctttgcaattcctattctgttaatcgctgttttccttgtgttgacctaatcatcattttctctaggatttctgaaagttactgacaatacccagacaggggctttgctatttaaaaattaaaattttcacaccacctgcttttctattcagcatcttttgcagtactctgtagacattagtcagtaatacagtgttatttctaggctctgaaatagccactttaagaatcatgtcatgatcttaagagagcactaatcatttctgtttga

SEQ ID NO: 341 - DNA, 1856 bp, Homo sapiens
agccaaaagaggaagggaccggcctcccacgtccacagggacctgacttccacctctctgcccagatttgcttatgtcactgtcgccccgggacggggaggtggggagctgagggcaagtcgcgcccgcccctgaaatcccagccgcctagcgattggctgcaagggtctcggcttggccgcggattaatcacacccgagggcttgaaaggtggctgggagcgccggacacctcagacggacggtggccagggatcaggcagcggctcaggcgaccctgagtgtgcccccaccccgccatggcccggctgctgcaggcgtcctgcctgctttccctgctcctggccggcttcgtctcgcagagccggggacaagagaagtcgaagatggactgccatggtggcataagtggcaccatttacgagtacggagccctcaccattgatggggaggagtacatccccttcaagcagtatgctggcaaatacgtcctctttgtcaacgtggccagctactgaggcctgacgggccagtacattgaactgaatgcactacaggaagagcttgcaccattcggtctggtcattctgggctttccctgcaaccaatttggaaaacaggaaccaggagagaactcagagatccttcctaccctcaagtatgtccgaccaggtggaggctttgtccctaatttccagctctttgagaaaggggatgtcaatggagagaaagagcagaaattctacactttcctaaagaactcctgtcctcccacctcggagctcctgggtacatctgaccgcctcttctgggaacccatgaaggttcacgacatccgctggaactttgagaagttcctggtggggccagatggtatacccatcatgcgctggcaccaccggaccacggtcagcaacgtcaagatggacatcctgtcctacatgaggcggcaggcagccctgggggtcaagaggaagtaactgaaggccgtctcatcccatgtccaccatgtaggggagggactttgttcaggaagaaatccgtgtctccaaccacactatctacccatcacagacccctttcctatcactcaaggccccagcctggcacaaatggatgcatacagttctgtgtactgccaggcatgtgggtgtgggtgcaatgtgggtgtttacacacatgcctacaggtatgcgtgattgtgtgtgtgtgcatgggtgtacagccacgtgtctacctatgtgtctttctgggaatgtgtaccatctgtgtgcctgcagctgtgtagtgctggacagtgacaaccctttctctccagttctccactccaatgataatagttcacttatacctaaacccaaaggaaaaaccagctctaggtccaattgttctgctctaactgatacctcaaccttggggccagcatctcccactgcctccaaatattagtaactatgactgacgtccccagaagtttctgggtctaccacactccccaaccccccactcctacttcctgaagggccctcccaaggctacatccccaccccacagttctccctgagagagatcaacctccctgagatcaaccaaggcagatgtgacagcaagggccacggaccccatggcaggggtggcgtcttcatgagggaggggcccaaagcccttgtgggcggacctcccctgagcctgtctgaggggccagcccttagtgcattcaggctaaggcccctgggcagggatgccacccctgctccttcggaggacgtgccctcacccctcactggtccactggcttgagactcaccccgtctgcccagtaaaagcctttctgcagcaaaaaaaaaaaaaaaaaaa

SEQ ID NO: 342 - DNA, 4099 bp, Homo sapiens
cagctgccagccgaggaggcgcggcggagaggggactgcggtcagctgcgtccacttggggctgtgcggcggtcccgcgcccggcgatgttcccgggcactccctgagtagcggcagcttatcccccgcccgctagcccgccctggtccccggctcgctcgctggctggcgcggccccggccccgctctgcgtcggccccgccgcggtggaggcgcgcgagggggacgcggccggggatgagcggattgcgggtgaactcgccgcccgggggccccgcgaagccgtgagccgctgcttttctccgagtcgccgccctgcccttggatttgagatcatgtccatccacatcgtggcgctggggaacgagggggacacattccaccaggacaaccggccgtcggggcttatccgcacttacctggggagaagccctctggtctccggggacgagagcagcttgttgctgaacgcggccagcacggtcgcgcgtccggtgttcaccgagtatcaggccagtgcgtttgggaatgtcaagctggtggtccacgactgtcccgtctgggacatatttgacagtgattggtacacttctcgaaatctaattgggggcgctgacatcattgtgatcaaatacaacgttaatgacaagttttcattccatgaagtaaaggataattatattccagtgataaaaagagcattaaattcagttccagtaattattgctgctgttggtaccagacaaaatgaagagttaccttgtacatgcccactatgtacctcagacagagggagctgtgttagtacaactgaagggatccaacttgcaaaagaactaggagcaacctatcttgaactccacagccttgatgacttctacataggaaagtattttggaggagtgttggagtattttatgattcaagccttaaatcagaagacaagtgaaaaaatgaagaaaagaaaaatgagcaactcctttcatggaattagaccacctcaacttgaacaaccagaaaaaatgcctgtcttaaaggctgaagcgtcacattataactctgacttaaataacttgctgttctgctgccagtgtgtggacgtggtattttataaccccgatttaaagaaagttgtagaggcccacaagatcgttctctgcgctgtaagccatgttttcatgctgcttttcaatgtgaagagtcccactgacattcaggattccagtatcatccgaactacccaggatctttttgctataaacagagatactgcatttccaggtgctagccatgaatcttcaggcaacccaccattacgagtcattgttaaagacgccctcttctgttcttgtttatcagacatccttcgcttcatttattcaggtgcttttcagtgggaagaattggaagaagatatcaggaagaagttgaaagattctggggatgtttcaaatgtaatcgagaaagttaaatgcattttaaaaacaccaggaaagattaattgcctaaggaattgcaaaacctatcaagccagaaaacctttgtggttttataacacttccctcaagtttttccttaataagccgatgcttgccgatgttgtcttcgaaattcaaggtacgacagtgccagcccacagggccatcctggtggcccgttgtgaagtgatggcagccatgtttaatggtaattacatggaagcaaagagtgtcctgattcccgtttatggtgtttccaaagagactttcttgtcatttttagaatacctgtacacagactcctgctgcccagctggcatattccaggccatgtgtctcctgatctgtgccgagatgtaccaagtgtccagactgcagcacatctgtgagctgttcatcattacccagctgcagagcatgccaagcagggaactggcatccatgaaccttgatatagttgacctgcttaaaaaggccaagtttcaccactctgattgcctttcaacctggctacttcatttcattgctactaactacctcatcttcagtcaaaagcctgaatttcaggatctttcagtggaagaacgcagttttgttgaaaagcacagatggccgtcgaatatgtacttgaagcagcttgcggaatacaggaagtatattcactcccggaaatgtcgttgcttagtaatgtaacctggagcttttatacactacatttcttttttattattatgaagaatgggatacctccaggttccagtaaaattcttctgaccgaaaccaatgtgggtgttagaaaaattaccatatagcttaatatgtttattagttctctttggaaaaaaactaccactgtggtcttaaaagggaacaaaatataccataggctaaaactaaggctttcactctagaatgcaaagctgttttgcagctgttttcccttaaagatgtcctgttgctttagtgatatttagacccctctcagttaagaaatgcttagattaaaaaaaaaaaattacgtaggattaatacagaaatttaatcatgtctgattaattgctctattaaaataaggggcatttaaagacccagcataaccatttgtataatgagaaatctaggggaaaaccaatcagtccaacatgagattttaggaatagaaatttgccggccatttggaaagtgaaatgccacttagttctcaattgatgacagtgtttgaatcatcataaaaaaaatacctgcttttcatctggacaacccaattgagccactttatctccttttggcaatctgagtaggcggggaacctaggcagggctggctttcttagcgtgtaacttgtgtagcagcacagggcccacacttagaaggaccccacacttggttcaaggctctgctatagcggaaattcttaataatgtttgaagaagggccccatgatttcattttgtgctgagccctcaaaattatgtctgtttcgtggtgggaaatatcctatgttttcttgctcaaacacctttctctctgaaagcagaaaaaggcactgatataaagggaagagaaggaggctcaccggagggaagagaacatagtgaagattcccgcctttggggaggtctggaccacccagggcctccactgccaccttggctggcaagggagaaatgtgttgtgttgtcttagctttaaaacagtcacagttcttgctctatcatagatgaacaaatactttcttgatcattctgtaagaccaggaggttggtaagagtgactaaccagcctaactttaatacacatgtataaagatgttcacagagaaagatgctctgtagagaatttgctaccgaagttggctcaagaatttgtttttagtgttatttaccaagattaggacgtcagtggcttaaattctttgaattcttttcaaggactgcaagattatttgataaagagtagcatgaatcttgtgctctaatattacacagtaagttcaaagaaaggatgtaagtcaaagacttgttacatagagggaaaatggactgggatagaggacagactgatagtttctttctttcatatcacatgtatagagaaataattatatcagaaactcacaaacctagacatggaaaaacagattactgtctattgtcagcatcattttcatctgtaagtcactactggaatatatttttcttttaatttccagtgactttagaatacacacagtttttccgacttttcaaaaatttgattaaatggttttatagtataatattgggaccccataccgttagcccttgtatgtataccaacactgccaaagtaaaacattaggtcaggcatggtggctcaggcctgtaatcccagcattttgggaggctgaggcaagtggataacttgaggtcatgagttcgaaaccagcctggccaaaacagtgaaaccccgtctctactaaaaatacaaaattagccagatgtggtggcgcacacctgtaatcccagctactcaggaagctgaggcaggaaaatcgcttgaacctgggaggtggaagttgcagtgagccgagatcgcaccactgcactccagcctgggtgacaagagcgaaactccatctc

SEQ ID NO: 343 - DNA, 5876 bp, Homo sapiens
caagggccccctgcgtggctaccgcagccgctggttcgtgttcgacgcgcgccgctgctacctttactatttcaagagtccgcaggacgcgctgcccctcggccacttggacatcgcggacgcctgcttcagctaccagggccccgacgaggcggcggagccgggcacggagccgcccgcgcacttccaggtgcacagcgcgggagccgtcacggtgctcaaggctcccaatcgtcaactcatgacttactggttacaggagcttcagcagaagagatgggaatattgtaacagtcttgacatggtcaagtgggacagcaggacctctccaactcccggggattttcctaagggtcttgtagccagagataacactgatttaatttacccacacccaaatgcttctgcagaaaaagccagaaatgtcctagctgtggagactgtgcctggagagctggtgggagaacaagctgcaaatcagcccgccccagggcatccaaattccattaatttttactctttgaaacagtggggcaatgagctcaagaattcgatgtcttctttccgtcctgggagaggacataatgatagtcggaggactgtgttttataccaatgaagagtgggaacttttagacccaacccctaaggacctagaggagtccatagtacaggaagaaaagaagaagctgacccctgaaggaaacaaaggagtaactggctcaggattcccctttgattttggacgtaacccctacaaaggaaagcgccctttgaaagacataattgggtcgtacaaaaatcgtcacagcagtggtgacccttcaagtgaaggcacatcaggcagtggcagcgtcagcatcaggaagccggcctccgaaatgcaactgcaggtccagagccagcaggaagagctggaacagttaaagaaagacctgtccagtcagaaggagcttgttcgactgctccagcagacagtccggtcatcccagtatgacaagtatttcacaagcagccggctctgtgagggggtcccaaaggacacgctcgagcttctgcaccaaaaggatgatcagattctgggccttaccagccagctggagaggttcagcttggagaaggagagtcttcagcaggaagtaaggacgctgaagagcaaagtgggcgagctcaacgagcagctgggaatgctcatggagaccatccaagccaaggacgaggtcatcatcaagctcagcgagggcgagggcaacgggcctcctcccaccgtggcgcccagctccccttcggttgtgcctgttgccagggaccagctggaactggacaggctgaaagataatctacaggggtacaaaacccaaaacaaatttctaaataaggagattttggaactctcagctctacgaagaaatgcagaaaggagagagagggatctgatggcaaagtattctagcctggaagccaagctctgccagatagaaagtaaatacctgatattgctccaagaaatgaagacaccagtgtgctcagaagaccaggggcccacccgggaggtcatagcccagttgctggaggatgctctgcaggttgagagccaagagcagccggagcaagcatttgttaaacctcatcttgtcagtgaatatgatatttatgggttcaggactgtacctgaggatgatgaggaagagaaattggttgccaaggtccgcgcgttggatctgaagactctctacctcacagaaaaccaggaagtctccactggggtcaagtgggaaaactattttgcaagtacagtgaacagggagatgatgtgctctccagagttaaaaaacctcatccgtgcgggcattccccacgagcaccgttccaaggtgtggaagtggtgtgtggaccgtcacaccaggaagttcaaggacaacactgagcctggccacttccagaccttgctgcagaaggcgctggagaaacagaacccagcctccaagcagattgagctggacttgctgcgaactctgcccaacaacaaacattactcctgccccacctcagaaggcatacagaagttacgcaatgtcctcctcgccttctcctggcggaatccagatatcggctactgtcaaggcctaaacaggttggtggcagtggccctcctgtacctggaacaagaagatgctttctggtgtctcgttaccatagtggaagttttcatgcctcgagactattatacaaagactcttttaggatcccaggtggaccagcgggtgttcagagaccttatgagtgagaagctgcctcggttgcatggccactttgaacagtacaaagtcgactacactctcatcactttcaactggtttctggtggtatttgtggatagtgtcgttagtgacatcctctttaaaatatgggactctttcctttatgaaggaccaaaggttattttccgttttgctctggcactttttaagtacaaggaagaggagattttgaaattgcaagattcgatgtctatatttaagtatctccgctacttcactcgcactatccttgatgctagatccggaaccgacgcgcctaccacttggagaaagtccggctggagctgaccgagctggaggccatccgtgaggacttcctgcgtgagcgggacaccagccctgacaagggtgagctggtcagtgacgaggaggaggatacctgagtgggctcgggatgctgctcttccttccttcacaaccaaagtgtgcccaaagggtgaaagtgcacttaaaagccagaatgtaacgtgtgtgtcctctggggatctgctgggcagatgtcccaagccaggctgcccttcctcatttcccactgtgcggggggcaggggtgggaggtctaatctgtttacaaccatttccgtgccatgcttttggttacacgtatctcagtcacgctttctgcctggttggtggatcctcaggcttaccagtggctatttgcaagagcctgtttccagcctccgtcagcctgtcggtgctctgaccctctgaaaccttgctttgctgggcatctccccatattctctctcctgtacatagtgggcagtggtgtgtggttttgaatggcagtgctataaaggatgccagctgtgctttaggcacctgtaggccagagggttgctgcctcaggcataaggttggtatgaaaaggggctgccttagaaaagcaggcacatcccttgttcagaaatggccactgtaggaaagcctgtgaacctcccaccagtggctttaagctgccagccatgccccatttctagaatagcctttgctcttccacacgcaacccttccatcagtgtcttccagcctgcatggggagggcctggctgcccagacacccaccctcacttctcatggccagcctgtgtttgcagatcactgggctgctctgtccccagcttgccccgtgccaggcatggctctgtgagattctgtggaatgcccttcttgacttgtggaaatcattcaccaagtacgatgggatgggattccaagtaaacagtggaccgtcatattgcaaagcaggcccacgcctgggctggccttggttgaggggatggaggaatgttttcgggggtgctttgcagggcagtggtgcagccgcagcgtgaacgctcttggacagctgaaaaccatggcctccttggggatggccagtgctcctggtgtctccacctgcctgggttgtgcaggaggccggctgccagtgcctggggctgggaaacttttttgcttggggcaggcttgggtgagctctcccagatgtgtgcccaccccaccactgcctggaacatccttgttctctgccaggatgcaggggcactgttgcctctgacacagcagtttctgggaactcagaggactgcctttctgaaggctggggagaggctttgagcaaggagcttgtttttgcttaatcgctctagaccatccctgatgcgtagatgtgagaggatgttttctggcacagtgttatgaaaatacaagataaatgatctcagtggaatgtttcatattacccgaaaaaaactggaaatcatcctttgttgtgaacacactgagactaagaattgaagcaatgcagttttaagaagtatttttcctattttttgctgtcaactttttggcaatgccacggcaaagttggtgtttcagcacatgctagagtgagctccggcttcgtgtctttaaccaactccactaatgtttcactgggtagacggagctggcctctatatttagccagaagcctttgcctcttttcaggcatcaaaaatgggttttgtcattgtctttgtctttgagagcagcagtttgaggtctgactccttcagttgtcctgtgagctgggcgttgcagtctgctcgaatcaagtgttggaaaccccccacccctcagcccatcgtgaaacgacagctgtcagcctggggggcggctgctgaggaggtgcagcaggaatggggctgggccctgaggttttactttccgagccaatggcccctggaacatgccagcacacactgccatgtcctggggctaagagctgcctttagggacaggctcgtgttgtccagtttgccctgagagatgcacctgaccaggggcccgtcgtggctgcaacccacggtggtatgttagtgtttccaggcagttgtcagcagctgccgggtagtgtgtgtgtgcgacagcaggagagttcctggaggaaagggactggggacactttctcagaggttctcctgcctggaatcaagtgatgcgtgtccagaaggcaagagagggcggctccgcctggttaaagtttgggaacgggacggagccaactcctccttccaggactgtgggccccactcttttgcgctaacacttcccctccctcgggtcactgaggaaagagctgctctgtcccctccagtgccctgaaggtccctggcctccactggctgccatggcagggggcccttctgacaggggctgccccaagctgctgttcctcctctgaaccttcaccccaacacccagcccgtggcccctgcaagggggaccctgccagctgggaaacccaaaggcctgtccaaacgtgcgcaccaggaccgaggggagctccctcccaacacctgctaggaattgccaacttttaaatggatggggttttttatgggttgaacctctgttaatacttttgtacactctcactacagtttatatttttataggctattttctcaaggtgtttctagattccacatatctattttatataacaagttattatgttatgtgtgtgactcccttgtgtgtatctgtgccagcctcagcctccgagttgcttttccctctggccctgactctcactgactcaccgatgtgatgtgcaggcccacttcttaccccagatagcctcgggcgctgcctgtagtcatgctgacagctgtacagtagccgccaagactgctgacagctggagacggttctggtttcaactacggtatattgatatcggaagtattctagacagatcctcggttgggttttctagctacatgtttgtattgcacagatccccacctgccatcctatagtgttgtcttcctgtgtgttccggggcttctgggcagctgggcctgcccggggaagtccttgcaggtgggaggccatacagagacccactgtgtgccactgagcgtcccactgctgctgggcaactggaggactgcagggggcgccaggtgactctctccttttatatcacagcagctcctgtgctgaccttcaagttacgttttggaactgtaatactaaaggaagaaataaactactaatttgtataat

SEQ ID NO: 344 - DNA, 4256 bp, Homo sapiens
cgagaccccagacgaggaccaggattcatgaaatcagtcgcaggggccggggcaggggcctctggctcccgacactggccgagaggtgatgagtgaggttcgaagaacggaagatttaaaaagcagccggggcctccgtattgaatgaaagacccagtgcaaagacatcaccatgaacactagcattccttatcagcagaatccttacaatccacggggcagctccaatgtcatccagtgctaccgctgtggagacacctgcaaaggggaagtggtccgcgtgcacaacaaccacttccacatcagatgcttcacctgtcaagtatgtggctgtggcctggcccagtcaggcttcttcttcaagaaccaggagtacatctgcacccaggactaccagcaactctatggcacccgctgtgacagctgccgggacttcatcacaggcgaagtcatctcggccctgggccgcacttaccaccccaagtgcttcgtgtgcagcttgtgcaggaagcctttccccattggagacaaggtgaccttcagcggtaaagaatgtgtgtgccaaacgtgctcccagtccatggccagcagtaagcccatcaagattcgtggaccaagccactgtgccgggtgcaaggaggagatcaagcacggccagtcactcctggctctggacaagcagtggcacgtcagctgcttcaagtgccagacctgcagcgtcatcctcaccggggagtatatcagcaaggatggtgttccatactgtgagtccgactaccatgcccagtttggcattaaatgtgagacttgtgaccgatacatcagtggcagagtcttggaggcaggagggaagcactaccacccaacctgtgccaggtgtgtacgctgccaccagatgttcaccgaaggagaggaaatgtacctcacaggttccgaggtttggcaccccatctgcaaacaggcagcccgggcagagaagaagttaaagcatagacggacatctgaaacctccatctcaccccctggatccagcattgggtcacccaaccgagtcatctgcgctaaagtggataatgagatccttaattacaaagacctggcggctctccccaaggttaagtctatctacgaggtacaacgccccgacctcatttcctatgagcctcattccagatacatgtccgacgagatgctggagagatgtggctatggagagtcgctgggaacattatctccctactcccaggacatctacgagaacctggacctccggcagagacgggcctccagcccggggtacatagactcccccacctacagccggcagggcatgtcccccaccttctcccgctcacctcaccactactaccgctctgggcccgagagtggccggagctctccataccatagccagttagatgtgaggtcctccactccaacctcttaccaggctcccaagcactttcacatcccagctggagacagtaacatctaccggaaacccccgatctacaaacggcatggtgatttgtctacagcaaccaagagcaaaacaagtgaagacatcagccagacctccaagtacagtcccatctactcgccagacccctactatgcttcggagtctgagtactggacctaccatgggtcccccaaagtgccccgagccagaaggttctcgtctggaggagaggaggatgattttgaccgcagcatgcacaagctccaaagtggaattggccggctgattctgaaggaagaaatgaaggcccggtcgagctcctatgcagatccctggacccctccccggagctccaccagcagccgggaagccctgcacacagctggctatgagatgtccctcaatggctcccctcggtcgcactacctggctgacagtgatcctctcatctccaaatctgcctccctgcctgcctaccgaagaaatgggctgcacaggacacccagcgcagacctcttccactacgacagcatgaacgcagtcaactggggcatgcgagagtacaagatctacccttatgaactgctgctggtgactacaagaggaagaaaccgactgcccaaggatgtagacaggacccgtttagagcgccacctgtcccaggaagagttctaccaagtctttggcatgaccatctctgagtttgaccggctggccctctggaagaggaatgaactgaagaagcaagcccggctgttctaggcagaggctctataaatatatatgcatttatataaagatatatgtaaaatctctctactgaagctcggtataatcctctcttgtctaatgggacacactgcctgccatgagacttgcttttctgtactgtcaggcaagcccacgtcatcgagatatttttatgctccttactttctcttttctaagtgctgtgggatctgggaagggatttgaggggactctgtccttttattggggatcctttttatactgaaacatctgtcctaacttgagtgccccaaggtccaactctctttcctaaagaaggtgcctgaagaagtctctcttctctctgcttcgtggcccctttcttaaatttctagggctgatgctgaccatgtggtttccacaccttattggccccagaggggccctcccatgggaagatctgcagcagtctccccaaatcagtgagcacctttgagcgcccacgaagaactttctcaacacccccaattaggagctcagtgctctcttggggcaatgcagttaaaagggtgagcctcaaatctagtcattacaccagtcaacagaagtggacagggcctaggcctctcctcagctccttaaccctcctccttctgccctggattgtaacctctcccttgtccaaatctaggattcctggtaggaaaaggaaaaggcccttcccttccctccaccacttccaactggcccctttgcctgacctggacttggagaaccagaggaaaagagagggagcggaagtgggagatggagcagggcacctgttagaatcagagctgcaggatttcttgggaccctcctctctccctcactgctcccagcacctcctgacccttccctctttcaaggagaagcccatgattgcagcttgtattctttagccttattacaatctatgtgcctgacaactcaacacaccgcagggctaatgttcccaccagagctccaactgaacaaccagacagacaactctcatcatcctccagagagaaaataggccgtgtctcaaagaaaggttcttggtctatgcctctggtctgtgggctggcagggcaaccataccatactcccgccagtcctcggctcctgctgcaaagttggccatgtttcacagggaaacttttggaagagtggctgcttatgagattccaaaatgaagtgttggccaacaccgctcatggccatcctggattttcccagtggcttcccttcctgctcgcctccctgaacaggggagaaagcttaacctctcttctcctctccaaacctttcaccttgaatgggtaatgtttggtgggggctgttccttcttggagaagccttgagtcggaccattttgagatcatggaggaaggatgaagaagtgaaaatgacaataatgactctcaagaggctggcgatgtgacatggcaaatgtagaactgacttaaattgaacaaaccctcactgagcacctctgatgttgagcacctgctgaatactgagcactgaatgggggagggggaggggagcacggggtgagtcaacctgggactcggtctcagggatatgcctaccaatagcgggtatcgtaaggcatgtacccaaacataacggatgtaaggcagaaagtgatcggagaaggaatgagaaagtgtgcgtgatgttaatgaaaagtcatatgcagctagagcagacccaggaaagctttctggaagagattgcatctgaggaaattcaggaaggatctttgtagattggggggagattctaaattgaaggggtgatagggtgaggggccagagggaagtctgctgtgttctcatgtaggatgtcagccctccctgcaacttctctttttggccaatgtcttttcactttcctgaccctttagaatcatccccagccagacgcaatcatggaagttgccttattgtcactggttaagaacttggcgagattgaagggcttttgttattgttgttggatatttttgtttcccataaaagcacatcatttcaaccct

SEQ ID NO: 345 - DNA, 3045 bp, Homo sapiens
actaagaccgcaaggcattcatttcctcctacggtggatgcggacgccgggaggaggagagccccagagagaggagctgggagcggaggcgcaggcaatgctcagccctggatgtagctgagaggctgggagaagagacgaccgctggagaccgagcggcgtggggaagacctaggggggtgggtgggggaagcagacaggagaacactcgaaatcaagcgctttacagattattttattttgtatagagaacacgtagcgactccgaagatcagccccaatgaacatgtcagtgttgactttacaagaatatgaattcgaaaagcagttcaacgagaatgaagccatccaatggatgcaggaaaactggaagaaatctttcctgttttctgctctgtatgctgcctttatattcggtggtcggcacctaatgaataaacgagcaaagtttgaactgaggaagccattagtgctctggtctctgacccttgcagtcttcagtatattcggtgctcttcgaactggtgcttatatggtgtacattttgatgaccaaaggcctgaagcagtcagtttgtgaccagggtttttacaatggacctgtcagcaaattctgggcttatgcatttgtgctaagcaaagcacccgaactaggagatacaatattcattattctgaggaagcagaagctgatcttcctgcactggtatcaccacatcactgtgctcctgtactcttggtactcctacaaagacatggttgccgggggaggttggttcatgactatgaactatggcgtgcacgccgtgatgtactcttactatgccttgcgggcggcaggtttccgagtctcccggaagtttgccatgttcatcaccttgtcccagatcactcagatgctgatgggctgtgtggttaactacctggtcttctgctggatgcagcatgaccagtgtcactctcactttcagaacatcttctggtcctcactcatgtacctcagctaccttgtgctcttctgccatttcttctttgaggcctacatcggcaaaatgaggaaaacaacgaaagctgaatagtgttggaactgaggaggaagccatagctcagggtcatcaagaaaaataatagacaaaagaaaatggcacaaggaatcacacgtggtgcagctaaaacaaaacaaaacatgagcaaacacaaaacccaaggcagcttagggataattaggttgatttaacccagtaagtttatgatccttttagggtgaggactcactgagtgcacctccatctccaagcactgctgctggaagaccccattccctctttatctatcaactctaggacaagggagaacaaaagcaagccagaagcagaggagactaatcaaaggcaaacaaaggctattaacacataggaaaatatgtatttactaagtgtcacatttctctaagatgaaagatttttactctagaaactgtgcgagcacaacacacacaatcctttctaactttatggacactaaactggagccaatagaaaagacaaaaatgaaagagacacagggtgtatatctagaacgataatgcttttgcagaaactaaagcctttttaagaaatgccagctgctgtagaccccatgagaaaagatgtcttaatcatccttatgaaaacagatgtaaacaactatatttcaactaacttcatcttcactgcatagcctcaggctagtgagtttgccaaaaccaaagggggtgaatacttccccaagattcttcctgggaggatggaaacagtgcagcccaggtcccatgggggcagctccatcccagagcatttctgatagttgaactgtaatttctactcttaagtgagatatgaagtattatccttttgttcagttgccccgggcttttgaacagaagagtaaatacagaattgaaaaagataaacactcaaccaaacaatgtgaaaacgggttctgtagtatttgtaaaaaggcccggcccaggaccactgtgagctggaaaagggagaaaggcagtgggaaaagaggtgagccgaagatcaattcgacagacagacggtgtgtatgcccctccctgtttgacttcacacacactcataactttccaaatgaaaccccacagtatagcgcatattttcgatatttttgtgaattccaaaaggaaatcacagggctgttcgaaatattgggggaacactgtgtttctgcatcatctgcatttgctccccaagcaatgtagaggtgtttaaagggccctctgctggctgagtggcaatactacaacaaacttcaaggcaagtttggctgaaaacagttgacaacaaagggcccccatacacttatccctcaaattttaagtgatatgaaatacttgtcatgtctttggccaaatcagaagatattcatcctgcttcaagtcagcttcagaaatgttttaaaagggactttagctctggaactcaaaatcaatttattaagagccatattctttaaaaaaaaaagctggataatattatctgtaatatttcagtcctttacaagccaaatacatgtgtcaatgtttctagtatttcaaagaagcaattatgtaaagttgttcaatgtgacataatagtattataattggttaagtagcttaatgattaggcaaactagatgaaaagattaggggcttccacactgcatagatcacacgcacatagccacgcatacacacacagacacacagatgtggggtacactgaatttcaaagcccaaatgaatagaaacacattttctggctagcagaaaaaaacaaaacaaaactgttgtttctctttcttgctttgagagtgtacagtaaaagggattttttcgaattatttttatattattttagctttaattgtgctgtcgttcatgaaacagagctgctctgcttttctgtcagagatggcaagggctttttcagcatctcgtttatgtgtggaatttaaaaagaataaagttttattccattctgaaaaaaaaaaaaaaaaa

SEQ ID NO: 346 - DNA, 3370 bp, Homo sapiens
gcccccgcccggcccgccccgctctcctagtcccttgcaacctggcgctgcatccgggccactgtcccaggtcccaggtcccggcccggagctatggagcggcgctggcccctggggctagggctggtgctgctgctctgcgccccgctgcccccgggggcgcgcgccaaggaagttactctgatggacacaagcaaggcacagggagagctgggctggctgctggatcccccaaaagatgggtggagtgaacagcaacagatactgaatgggacacccctctacatgtaccaggactgcccaatgcaaggacgcagagacactgaccactggcttcgctccaattggatctaccgcggggaggaggcttcccgcgtccacgtggagctgcagttcaccgtgcgggactgcaagagtttccctgggggagccgggcctctgggctgcaaggagaccttcaaccttctgtacatggagagtgaccaggatgtgggcattcagctccgacggcccttgttccagaaggtaaccacggtggctgcagaccagagcttcaccattcgagaccttgcgtctggctccgtgaagctgaatgtggagcgctgctctctgggccgcctgacccgccgtggcctctacctcgctttccacaacccgggtgcctgtgtggccctggtgtctgtccgggtcttctaccagcgctgtcctgagaccctgaatggcttggcccaattcccagacactctgcctggccccgctgggttggtggaagtggcgggcacctgcttgccccacgcgcgggccagccccaggccctcaggtgcaccccgcatgcactgcagccctgatggcgagtggctggtgcctgtaggacggtgccactgtgagcctggctatgaggaaggtggcagtggcgaagcatgtgttgcctgccctagcggctcctaccggatggacatggacacaccccattgtctcacgtgcccccagcagagcactgctgagtctgagggggccaccatctgtacctgtgagagcggccattacagagctcccggggagggcccccaggtggcatgcacaggtcccccctcggccccccgaaacctgagcttctctgcctcagggactcagctctccctgcgttgggaacccccagcagatacggggggacgccaggatgtcagatacagtgtgaggtgttcccagtgtcagggcacagcacaggacggggggccctgccagccctgtggggtgggcgtgcacttctcgccgggggcccgggcgctcaccacacctgcagtgcatgtcaatggccttgaaccttatgccaactacacctttaatgtggaagcccaaaatggagtgtcagggctgggcagctctggccatgccagcacctcagtcagcatcagcatggggcatgcagagtcactgtcaggcctgtctctgagactggtgaagaaagaaccgaggcaactagagctgacctgggcggggtcccggccccgaagccctggggcgaacctgacctatgagctgcacgtgctgaaccaggatgaagaacggtaccagatggttctagaacccagggtcttgctgacagagctgcagcctgacaccacatacatcgtcagagtccgaatgctgaccccactgggtcctggccctttctcccctgatcatgagtttcggaccagcccaccagtgtccaggggcctgactggaggagagattgtagccgtcatctttgggctgctgcttggtgcagccttgctgcttgggattctcgttttccggtccaggagagcccagcggcagaggcagcagaggcacgtgaccgcgccaccgatgtggatcgagaggacaagctgtgctgaagccttatgtggtacctccaggcatacgaggaccctgcacagggagccttggactttacccggaggctggtctaattttccttcccgggagcttgatccagcgtggctgatggtggacactgtcataggagaaggagagtttggggaagtgtatcgagggaccctcaggctccccagccaggactgcaagactgtggccattaagaccttaaaagacacatccccaggtggccagtggtggaacttccttcgagaggcaactatcatgggccagtttagccacccgcatattctgcatctggaaggcgtcgtcacaaagcgaaagccgatcatgatcatcacagaatttatggagaatgcagccctggatgccttcctgagggagcgggaggaccagctggtccctgggcagctagtggccatgctgcagggcatagcatctggcatgaactacctcagtaatcacaattatgtccaccgggacctggctgccagaaacatcttggtgaatcaaaacctgtgctgcaaggtgtctgactttggcctgactcgcctcctggatgactttgatggcacatacgaaacccagggaggaaagatccctatccgttggacagcccctgaagccattgcccatcggatcttcaccacagccagcgatgtgtggagctttgggattgtgatgtgggaggtgctgagctttggggacaagccttatggggagatgagcaatcaggaggttatgaagagcattgaggatgggtaccggttgccccctcctgtggactgccctgcccctctgtatgagctcatgaagaactgctgggcatatgaccgtgcccgccggccacacttccagaagcttcaggcacatctggagcaactgcttgccaacccccactccctgcggaccattgccaactttgaccccagggtgactcttcgcctgcccagcctgagtggctcagatgggatcccgtatcgaaccgtctctgagtggctcgagtccatacgcatgaaacgctacatcctgcacttccactcggctgggctggacaccatggagtgtgtgctggagctgaccgctgaggacctgacgcagatgggaatcacactgcccgggcaccagaagcgcattctttgcagtattcagggattcaaggactgatccctcctctcaccccatgcccaatcagggtgcaaggagcaaggacggggccaaggtcgctcatggtcactccctgcgccccttcccacaacctgccagactaggctatcggtgctgcttctgcccgctttaaggagaaccctgctctgcaccccagaaaacctctttgttttaaaagggaggtgggggtagaagtaaaaggatgatcatgggagggagctcaggggttaatatatatacatacatacacatatatatattgttgtaaataaacaggaaatgattttctgcctccatcccacccatcagggctgcaggcact

SEQ ID NO: 347 - DNA, 4151 bp, Homo sapiens
cgcaacttcatagacggttgtgaagacaagctagacggcagatgaaagttcttggcacagagtgaacacttgataaactatatggcagccacagcctccggagccgttgcacacctacctgcccggccgacttacctgtacttgccgccgtcccggctcacctggcggtgcccgaggagtagtcgctggagtccgcgcctccctgggactgcaatgtgccgatcttagctgctgcctgagaggatgtctggggtgtccgagcccctgagtcgagtaaagttgggcacgttacgccggcctgaaggccctggagagcccatggtggtggtaccagtagatgtggaaaaggaggacgtgcgtatcctcaaggtctgcttctatagcaacagcttcaatcctgggaaaaacttcaaactggtcaaatgcactgtccagacggagatccgggagatcatcacctccatcctgctgagcgggcggatcgggcccaacatccggttggctgagtgctatgggctgaggctgaagcacatgaagtccgatgagatccactggctgcacccacagatgacagtgggtgaggtgcaggacaagtatgagtgtctgcacgtggaagccgagtggaggtatgaccttcaaatccgctacttgccagaagacttcatggagagcctgaaggaggacaggaccacgctgctctatttttaccaacagctccggaacgactacatgcagcgctacgccagcaaggtcagcgagggcatggccctgcagctgggctgcctggagctcaggcggttcttcaaggatatgccccacaatgcacttgacaagaagtccaacttcgagctcctagaaaaggaagtggggctggacttgtttttcccaaagcagatgcaggagaacttaaagcccaaacagttccggaagatgatccagcagaccttccagcagtacgcctcgctcagggaggaggagtgcgtcatgaagttcttcaacactctcgccggcttcgccaacatcgaccaggagacctaccgctgtgaactcattcaaggatggaacattactgtggacctggtcattggccctaaagggatccgccagctgactagtcaggacgcaaagcccacctgcctggccgagttcaagcagatcaggtccatcaggtgcctcccgctggaggagggccaggcagtacttcagctgggcattgaaggtgccccccaggccttgtccatcaaaacctcatccctagcagaggctgagaacatggctgacctcatagacggctactgccggctgcagggtgagcaccaaggctctctcatcatccatcctaggaaagatggtgagaagcggaacagcctgccccagatccccatgctaaacctggaggcccggcggtcccacctctcagagagctgcagcatagagtcagacatctacgcagagattcccgacgaaaccctgcgaaggcccggaggtccacagtatggcattgcccgtgaagatgtggtcctgaatcgtattcttggggaaggcctttttggggaggtctatgaaggtgtctacacaaatcataaaggggagaaaatcaatgtagctgtcaagacctgcaagaaagactgcactctggacaacaaggagaagttcatgagcgaggcagtgatcatgaagaacctcgaccacccgcacatcgtgaagctgatcggcatcattgaagaggagcccacctggatcatcatggaattgtatccctatggggagctgggccactacctggagcggaacaagaactccctgaaggtgctcaccctcgtgctgtactcactgcagatatgcaaagccatggcctacctggagagcatcaactgcgtgcacagggacattgctgtccggaacatcctggtggcctcccctgagtgtgtgaagctgggggactttggtctttcccggtacattgaggacgaggactattacaaagcctctgtgactcgtctccccatcaaatggatgtccccagagtccattaacttccgacgcttcacgacagccagtgacgtctggatgttcgccgtgtgcatgtgggagatcctgagctttgggaagcagcccttcttctggctggagaacaaggatgtcatcggggtgctggagaaaggagaccggctgcccaagcctgatctctgtccaccggtcctttataccctcatgacccgctgctgggactacgaccccagtgaccggccccgcttcaccgagctggtgtgcagcctcagtgacgtttatcagatggagaaggacattgccatggagcaagagaggaatgctcgctaccgaacccccaaaatcttggagcccacagccttccaggaacccccacccaagcccagccgacctaagtacagaccccctccgcaaaccaacctcctggctccaaagctgcagttccaggttcctgagggtctgtgtgccagctctcctacgctcaccagccctatggagtatccatctcccgttaactcactgcacaccccacctctccaccggcacaatgtcttcaaacgccacagcatgcgggaggaggacttcatccaacccagcagccgagaagaggcccagcagctgtgggaggctgaaaaggtcaaaatgcggcaaatcctggacaaacagcagaagcagatggtggaggactaccagtggctcaggcaggaggagaagtccctggaccccatggtttatatgaatgataagtccccattgacgccagagaaggaggtcggctacctggagttcacagggcccccacagaagcccccgaggctgggcgcacagtccatccagcccacagctaacctggaccggaccgatgacctggtgtacctcaatgtcatggagctggtgcgggccgtgctggagctcaagaatgagctctgtcagctgccccccgagggctacgtggtggtggtgaagaatgtggggctgaccctgcggaagctcatcgggagcgtggatgatctcctgccttccttgccgtcatcttcacggacagagatcgagggcacccagaaactgctcaacaaagacctggcagagctcatcaacaagatgcggctggcgcagcagaacgccgtgacctccctgagtgaggagtgcaagaggcagatgctgacggcttcacacaccctggctgtggacgccaagaacctgctcgacgctgtggaccaggccaaggttctggccaatctggcccacccacctgcagagtgacggagggtggggccacctgcctgcgtcttcgcccctgcctgccatgtacctcccctgccttgctgttggtcatgtgggtcttccagggagaaggccaaggggagtcaccttcccttgccactttgcacgacgccctctccccacccctacccctggctgtactgctcaggctgcagctggacagaggggactctgggctatggacacagggtgacggtgacaaagatggctcagagggggactgctgctgcctggccactgctccctaagccagcctggtccatgcagggggctcctgggggtggggaggtgtcacatggtgcccctagctttatatatggacatggcaggccgatttgggaaccaagctattcctttcccttcctcttcggccctcagatgtcccttgatgcacagagaagctggggaggagctttgttttgggggtcaggcagccagtgagatgagggatgggcctggcattcttgtacagtgtatattgaaatttatttaatgtgagtttggtctggactgacagcatgtgccctcctgagggaggacctggggcacagtccaggaacaagctaattgggagtccaggcacaggatgctgtgttgtcaacaaaccaagcatcagggggaagaagcagagagatgcggccaagataggaccttgggccaaatccgctctcttcctgcccctctttctctttcttcctttactttcccttgcttttccctcttttcttactcctcctctttctctccccaacccccattctcatctgcacccttcttttctcatgtgtttgcataaacattcttttaacttctttctatttgacttgtggttgaattaaaattgtcccatttgcttg

SEQ ID NO: 348 - DNA, 4957 bp, Homo sapiens
gcatccccttgattaaatgtttttcctcctatgcaatcaccattagctgtttggctcccattctgtattcttctgaagcagccctgcattgcaaatcaatatctttctgaaaagacagtgtgttgtgaattgccttgacagcatatgcacggttactttggctgcaatgctgctgcagagcccggttactctgccttcgtgggaactccacagatatgtgtcacaaagatgtctacacggaactgccagggaatggactcagtgatcaaacccctggacacaattcctgaggataaaaaagtcagagttcagaggacacagagcacttttgacccatttgagaaaccagctaatcaagtaaagagggtgcattctgagaacaatgcttgcattaactttaagacctcctccactggcaaagagtcacctaaagttaggcggcactccagccccagctcgccaacaagtcccaaatttggaaaagctgactcatatgaaaagctggaaaaactaggggaaggatcttatgctacagtatacaaagggaaaagcaaggtaaatgggaagttggtagctctgaaggtgatcaggctgcaggaagaagaagggacacctttcacagctatcagggaagcttctcttttaaaaggactaaaacatgctaacatagtgctacttcatgacatcatccataccaaggagacgctgacacttgtgtttgaatatgtgcacactgatttatgtcagtacatggacaagcaccctggggggctgcatccagataatgtgaagttgtttttatttcagttgctgcgaggtctgtcttacatccaccagcgttatattttgcacagagacctgaaaccacagaaccttctgatcagtgacacgggggagttaaagctggcagatttcggtcttgcaagagcaaaatccgtccctagccacacatactccaacgaagtggttaccttgtggtacagacctccagatgtccttctaggctcaacagaatattccacctgccttgacatgtggggagtaggttgcatctttgttgaaatgatccaaggagttgctgcttttccaggaatgaaagacattcaggatcaacttgaacgaatatttctggttcttggaacaccaaatgaggacacatggcctggagttcattctttaccacattttaagccagaacgctttaccctgtacagctctaaaaaccttagacaagcatggaataagctcagctatgtgaaccatgcagaggacctggcctccaagctcctacaatgttccccaaagaacagactgtcggcacaggctgccttgagccacgagtattttagtgacctgccgccacggctatgggaactcaccgacatgtcttctatttttactgtcccaaatgtgagattgcaaccagaagctggagaaagcatgcgggcctttgggaaaaacaatagttatggcaaaagtctatcaaacagcaagcactgacaagcagcacattctcaagagcacacaggattaagttgtcatcattctgggaagaaaaaaaaaacattaatgaagaggccaataatatgaagggaatcatggatcagttttctttcgctccctgtggtggatttcacttacaagaaaattgaagctggcaagaccctgttttctctgcaatttatttaaaaccttgcacgcatttggataccttgtgatttccaagaactacgtgaagattaagctttgcttactgatacatggcatgtattcttttcagtcttttgtgtttgattttgtttgatttccctctgcagcacagcgtctctgtaaaggtttttatgctttcaccagccatgtcttaaatacattaagacaacacatttggtgttcacacttcttcagtaatgtctgaacttgaaagccacagagtggcataaaacaatgtgtgttttctttgagagcagtgcacattttgcaaccactaggaaggaaattttctgctaaagcaaacccctgttctctgacttgacaacttggccccggactgtggggccccacctgttgcttaccttttgaggtaattttgcaaatgtggtttttttacttggaaataactgcacatttatatataggatattggactctgcttagcattttcaagccacatagcatgactgttttttgaataggttggaattgaaaaaacaattatcaaacgttaagaacaaagacagggataaattgcttacatttcaacctctagagattgaggtaactttttgtgtctgggtcttgtcaacatctaatttttttccatccattctgttacactttgtattttctaactggagaaaagagtgaggaacagaatgttttaaatctggtgcaaaagaactatatctgctggatgagccttgaaagcagtcttggcctgttagggcttacaaagtaaattacaaagtgatccagttcaaagtttgcttagttacaacaaagcacctttaaaaaaaatacattttaaaaaaacattccaagccaattggaagacatcattgggttcttactttaagacatctcctggaataactgttcaaatgcaggttttagaaacaatgcaggaatcttgctttaaagatgaaaaagggaatgggccagcttcccttactcaaggagttgagggaccttggaggatgaaggcgagtatgtgacactggagaaaagtggaccaggcatgtcttttgctttgatctggagggagggctgcctgatgcaggccggctcccagtggggcaggcctcgctgcagaatgcccagtagtactgcggccaaggggacagttaggagacttcatctaaagcatgaaacctagctcctctacacacaaattcctatggaaatacctttgtgtacagtgtcttacattttcctattagtcagaaagaaggagagaatgagtgagtgcttgaaatgtgtcatactgttttaggatcaagactaggaattaggagccaggttgacaaggactttttctgagagttgggtgagggtaaagcttttctataatcaagctcaatacaccaaggaaactggatccagaattcctaaactttaaaatggtactgtctgcggagtggagtatggatggttatgtcaaagtcatagttcatcctatccagatgtagcattcatggtaaacttttaagtgctaagcaaggaattatttactgattggttttaaagagagcagaaaacacccaagtgtagaatgtctactgtttgctacctagaaatcttttccattcctctttcatacattccaacccactggaagtctttagaggtattttgatttaaagtatacttaaattaggatttcttaaagaaaacatagggagaaaactttacatgcaattaaaaatggactttcctgtgatttgtttttaatcattcatttggagaagaggcatgacctttgtatttcactaagtttaaagcaagagcaactgatgattaaatgttgctttttaataaggtttttaacttgaaaatttgaaaatatttaatgttgaaagacttcaattagggctattagagttatatctccctgtcgtaggcagcttcttcggagaagtgaaatataacattactcagtggacggagaagtctgttttgttacagagacatgcctctcagaaggtcaggaggttttgagtacctatccttgccacccatacaggaaatccaaagtttggtgtctctctctctctctgtctctttctttctctttctccccccaaacccctctcactccctccctccctctctccttcccctatttgcaatcatattctccctctgcttcttttctcttctgccctccttgtgggcagtcatgaaaatcaattcagactgtgttcattagcagatttattattctattgagaaagcactggaatgttttgtgagattatttttatatgaaggaatagcctgaactcaaacagatggtaagaatagtacaaacaccttagcacatcactgcacacacagtattctgaaaggagatttgacacttaattcccattttcttaaaataacagttttgttgacttaaaaatatgagatacataggatgtgaaaaaaaatgtttgcagtactcagcaaaaaatagggtacataaagcagggtggctgtccatccactgattctggggtgagaagcgatttctacctcgcaagagtgactagaaagtttctaggagcacctccaggcttgcaaagaaagtgaggcctcttggtatcctttcctcagtgtgtatatgacagccagtataatcaataccctaggttatgcgtctatatgatactcatctgtgaatattattggttttgtaatctttgttatataagaggatgtttaggctgtatatactggggtagattattgcctgccccttatacataggaatatgctgcataattgcgcataacttccatctcccttactggcttgtaggcagaggaaactgtatatgttactgccttgtacttttctcatacaccaaaaacacaccaaaaaaatcaataaaataagcaatcttctattctcattccttttcccacagcagcatattttagaggcacatacaaaacctacattctctagttgggagtggatttttaaagttttccttttatcttttatttttttttttgtatgatgcactgagatgtgtactttctaacaggggattggtacctaagaaacgtggtagcattattcagaaaactattatactttcaaatgacacatagtaaggagaatggaataatacatgttgcatatttgttaccagttgtaatttgtctgtattatgaaagatgtaatggtttgtcagctgtcactgttgttttcttgtaacatgatatggaataaagtatagcagaatctccgt

SEQ ID NO: 349 - DNA, 3293 bp, Homo sapiens
cgctccctcccctcctagctggcttcggcggggacggcggcggcggcggcggcggcggcggcgggcggggagggcgtgcgccggccgagaggtgtcggcggcgaggcaaaggaagtttcaagtggaaggtcgtccgtcggccggcgcgtcctcctgctctcctccgcagcatcatggcggagccgagcggctcgcccgtgcacgtccagcttccccagcaggcggccccggtgacagcggcggcggcggcggccccggcggccgcgacagcagcgccggccccggcagctcccgcggccccggccccggccccggccccggccccggcggcacaggctgtcggctggcccatctgcagggacgcgtacgagctgcaggaggttatcggcagtggagctactgctgtggttcaggcagccctatgcaaacccaggcaagaacgtgtagcaataaaacggatcaacttggaaaaatgccagaccagtatggatgaactattaaaagaaattcaagccatgagtcagtgcagccatcccaacgtagtgacctattacacctcttttgtggtcaaagatgaactttggctggtcatgaaattactaagtggaggttcaatgttggatatcataaaatacattgtcaaccgaggagaacacaagaatggagttctggaagaggcaataatagcaacaattcttaaagaggttttggaaggcttagactatctacacagaaacggtcagattcacagggatttgaaagctggtaatattcttctgggtgaggatggttcagtacaaatagcagattttggggtaagtgcgttcctagcaacagggggtgatgttacccgaaataaagtaagaaaaacattcgttggcaccccatgttggatggctcctgaagtcatggaacaggtgagaggctatgacttcaaggctgacatgtggagttttggaataactgccattgaattagcaacaggagcagcgccttatcacaaatatcctcccatgaaagtgttaatgttgactttgcaaaatgatccacccactttggaaacaggggtagaggataaagaaatgatgaaaaagtacggcaagtcctttagaaaattactttcactgtgtcttcagaaagatccttccaaaaggcccacagcagcagaacttttaaaatgcaaattcttccagaaagccaagaacagagagtacctgattgagaagctgcttacaagaacaccagacatagcccaaagagccaaaaaggtaagaagagttcctgggtcaagtggtcaccttcataaaaccgaagacggggactgggagtggagtgacgacgagatggatgagaagagcgaagaagggaaagcagctttttctcaggaaaagtcacgaagagtaaaagaagaaaatccagagattgcagtgagtgccagcaccatccccgaacaaatacagtccctctctgtgcacgactctcagggcccacccaatgctaatgaagactacagagaagcttcttcttgtgccgtgaacctcgttttgagattaagaaactccagaaaggaacttaatgacatacgatttgagtttactccaggaagagatacagcagatggtgtatctcaggagctcttctctgctggcttggtggatggtcacgatgtagttatagtggctgctaatttacagaagattgtagatgatcccaaagctttaaaaacattgacatttaagttggcttctggctgtgatgggtcggagattcctgatgaagtgaagctgattgggtttgctcagttgagtgtcagctgatgtatgtcccttgatgtcaccctgatctgtcatgccccaccgccacccctactcccttcaaccctccctctttctgcccatttcctcccaccccctcactcccatttcctagcaaaatcagaagattgtgaagaggccggcttcaacaaaatgggataaaaaaataattttttaaaacttacaacactccgagttctgctttattctctagcaatccacagtacaagaacaagcaaatgccacagctgcacgactgttgctcatttttccaaaagctatttaatattcttagcaatcaatttggatatcccttaagtgaaaagaatctgaaatacactcaggtggtcttatttattggcaacaaaaggaattttctatccagaagcctatttctcctttcattgttgttatttctgttataatactttaaattgtacatctgacaatactgcctcttttatgttgtatttagaaattaatatacttataaaattaagatttattagccaaacttgaattctagttttaaaactgactgtgaattttatttttcatatatttatgcattacacaccttagctataagaaaaaaagggttttgattatatgcttcttgcagttaatctcgttatttaaacaaaaagttttgggtctgtctttggagtatttgtaacttctaaattttgaaatgactgaattaggaatttggatgcttattcttttagtctgtttgcctaaaaaccaatttacaatctgactgtctcttgggagagggaggtgccttgcaaactttcacattaagaatgtgcctgaggctgctttactctggaatagtctcagatctaaaatttcctctatataaggtggcatatgttaagttttgcttcattggaccgtttagaatgctatgtaaaatgttgccattctgttagattgctaactatatacccatctctgatttggctctccttaagtgataggatttgttattctaaaggtgataaacttgaaaatatcagaatctgagttttacttgaaattttgcagaatacccaggtggagtgaaaattggaagggttttgtgcaatgactaaaaggtaaaacgctgttaaggttcaagaatcaatactttcaacccaagtagccccctgcttgactgtatattatggaactagtaaaccttaggattttgaaaattggagtctaatctttcaaggaggtgggctcccaggatggtaccattgctctttcctagctaaccctagatatggcagctctttaatgtacttcaaaaagcaaatatatattactaaggaaaaaaagttatttataattgccttgtcataattgttaaggtgttctagagccatttgcatacaatttaatgtaatttcattccattctattgtttacacaacgattactcgaagatgactgcaaaggtaaaaggaaaataaaagtgtattgcacaatgag

SEQ ID NO: 350 - DNA, 852 bp, Homo sapiens
caccctgtaagtggctgcggcgggaagatggcggagctgcgcgtgctcgtagctgtcaagagggtcatcgactacgccgtgaagatccgagtgaagcctgacaggaccggtgtggtcacggatggtgtgaagcactccatgaaccccttctgtgagatcgcggtggaggaggctgtgcggctcaaggagaagaagctggtgaaggaggtcatcgccgtcagctgtgggcctgcacagtgccaggagacgattcgtaccgccctggccatgggtgcagaccgaggtatccacgtggaggtgcccccagcagaagcagaacgcttgggtcccctgcaggtggctcgggtcctggccaagctggcagagaaggagaaggtggacctggtgctgctgggcaaacaggccatcgatgatgactgtaaccagacagggcagatgacagctggatttcttgactggccacagggcacattcgcctcccaggtgacgctggagggggacaagttgaaagtggagcgggagatcgatgggggcctggagaccctgcgcctgaagctgccagctgtggtgacagctgacctgaggctcaacgagccccgctacgccacgctgcccaacatcatgaaagccaagaagaagaagatcgaggtgatcaagcctggggacctgggtgtggacctgacctccaagctctctgtgatcagtgtggaggacccgccccagcgcacggccggcgtcaaggtggagaccactgaggacctggtggccaagctgaaggagattgggcggatttgagcccctcccagagatggcaataaaactgactctcaacatcaaaaaaaaaaaaaaaaa

SEQ ID NO: 351 - DNA, 1837 bp, Homo sapiens
acaaccgtaacagccaccagacaagcttcagtggccggcccttcacatccagacttgcctgagaggacccacctctgagtgtccagtggtcagttgccccaggatggggaccacagccagagcagccttggtcttgacctatttggctgttgcttctgctgcctctgagggaggcttcacggctacaggacagaggcagctgaggccagagcactttcaagaagttggctacgcagctcccccctccccacccctatcccgaagcctccccatggatcaccctgactcctctcagcatggccctccctttgagggacagagtcaagtgcagccccctccctctcaggaggccacccctctccaacaggaaaagctgctacctgcccaactccctgctgaaaaggaagtgggtccccctctccctcaggaagctgtccccctccaaaaagagctgccctctctccagcaccccaatgaacagaaggaaggaacgccagctccatttggggaccagagccatccagaacctgagtcctggaatgcagcccagcactgccaacaggaccggtcccaagggggctggggccaccggctggatggcttcccccctgggcggccttctccagacaatctgaaccaaatctgccttcctaaccgtcagcatgtggtatatggtccctggaacctaccacagtccagctactcccacctcactcgccagggtgagaccctcaatttcctggagattggatattcccgctgctgccactgccgcagccacacaaaccgcctagagtgtgccaaacttgtgtgggaggaagcaatgagccgattctgtgaggccgagttctcggtcaagacccgaccccactggtgctgcacgcggcagggggaggctcggttctcctgcttccaggaggaagctccccagccacactaccagctccgggcctgccccagccatcagcctgatatttcctcgggtcttgagctgcctttccctcctggggtgcccacattggacaatatcaagaacatctgccacctgaggcgcttccgctctgtgccacgcaacctgccagctactgaccccctacaaagggagctgctggcactgatccagctggagagggagttccagcgctgctgccgccaggggaacaatcacacctgtacatggaaggcctgggaggatacccttgacaaatactgtgaccgggagtatgctgtgaagacccaccaccacttgtgttgccgccaccctcccagccctactcgggatgagtgctttgcccgtcgggctccttaccccaactatgaccgggacatcttgaccattgacatcagtcgagtcacccccaacctcatgggccacctctgtggaaaccaaagagttctcaccaagcataaacatattcctgggctgatccacaacatgactgcccgctgctgtgacctgccatttccagaacaggcctgctgtgcagaggaggagaaattaaccttcatcaatgatctgtgtggtccccgacgtaacatctggcgagaccctgccctctgctgttacctgagtcctggggatgaacaggtcaactgcttcaacatcaattatctgaggaacgtggctctagtgtctggagacactgagaacgccaagggccagggggagcagggctcaactggaggaacaaatatcagctccacctctgagcccaaggaagaatgagtcaccccagagccctagagggtcagatggggggaaccccaccctgccccacccatctgaacactcattacactaaacacctcttggatttggaaaaaaaaaaaaaaaaaa

SEQ ID NO: 352 - DNA, 1462 bp, Homo sapiens
acaaccgtaacagccaccagacaagcttcagtggccggcccttcacatccagacttgcctgagaggacccacctctgagtgtccagtggtcagttgccccaggatggggaccacagccagagcagccttggtcttgacctatttggctgttgcttctgctgcctctgagggaggcttcacggctacaggacagaggcagctgaggccagagcactttcaagaagttggctacgcagctcccccctccccacccctatcccgaagcctccccatggatcaccctgactcctctcagcatggccctccctttgagggacagagtcaagtgcagccccctccctctcaggaggccacccctctccaacaggaaaagctgctacctgcccaactccctgctgaaaaggaagtgggtccccctctccctcaggaagctgtccccctccaaaaagagctgccctctctccagcaccccaatgaacagaaggaaggaacgccagctccatttggggaccagagccatccagaacctgagtcctggaatgcagcccagcactgccaacaggaccggtcccaagggggctggggccaccggctggatggcttcccccctgggcggccttctccagacaatctgaaccaaatctgccttcctaaccgtcagcatgtggtatatggtccctggaacctaccacagtccagctactcccacctcactcgccagggtgagaccctcaatttcctggagattggatattcccgctgctgccactgccgcagccacacaaaccgcctagagtgtgccaaacttgtgtgggaggatacccttgacaaatactgtgaccgggagtatgctgtgaagacccaccaccacttgtgttgccgccaccctcccagccctactcgggatgagtgctttgcccgtcgggctccttaccccaactatgaccgggacatcttgaccattgacatcagtcgagtcacccccaacctcatgggccacctctgtggaaaccaaagagttctcaccaagcataaacatattcctgggctgatccacaacatgactgcccgctgctgtgacctgccatttccagaacaggcctgctgtgcagaggaggagaaattaaccttcatcaatgatctgtgtggtccccgacgtaacatctggcgagaccctgccctctgctgttacctgagtcctggggatgaacaggtcaactgcttcaacatcaattatctgaggaacgtggctctagtgtctggagacactgagaacgccaagggccagggggagcagggctcaactggaggaacaaatatcagctccacctctgagcccaaggaagaatgagtcaccccagagccctagagggtcagatggggggaaccccaccctgccccacccatctgaacactcattacactaaacacctcttggatttggaaaaaaaaaaaaaaaaaa

SEQ ID NO: 353 - DNA, 916 bp, Homo sapiens
ccacgtccggggtgccgagccaactttcctgcgtccatgcagccccgccggcaacggctgcccgctccctccacgtccggggtgccgagccaactttcctgcgtccatgcagccccgccggcaacggctgcccgctccctggtccgggcccaggggcccgcgccccaccgccccgctgctcgcgctgctgctgttgctcgccccggtggcggcgcccgcggggtccgggggccccgacgaccctgggcagcctcaggatgctggggtcccgcgcaggctcctgcagcagaaggcgcgcgcggcgcttcacttcttcaacttccggtccggctcgcccagcgcgctgcgagtgctggccgaggtgcaggagggccgcgcgtggattaatccaaaagagggatgtaaagttcacgtggtcttcagcacagagcgctacaacccagagtctttacttcaggaaggtgagggacgtttggggaaatgttctgctcgagtgtttttcaagaatcagaaacccagaccaaccatcaatgtaacttgtacacggctcatcgagaaaaagaaaagacaacaagaggattacctgctttacaagcaaatgaagcaactgaaaaaccccttggaaatagtcagcatacctgataatcatggacatattgatccctctctgagactcatctgggatttggctttccttggaagctcttacgtgatgtgggaaatgacaacacaggtgtcacactactacttggcacagctcactagtgtgaggcagtgggtaagaaaaacctgaaaattaacttgtgccacaagagttacaatcaaagtggtctccttagactgaattcatgtgaacttctaatttcatatcaagagttgtaatcacatttatttcaataaatatgtgagttcctgc

SEQ ID NO: 354 - DNA, 462 bp, Homo sapiens
atggcctcgcccgacccgcccgccaccagctacgccccgtccgacgtgccctcgggggtcgcgctgttcctcaccatccctttcgccttcttcctgcccgagctgatatttgggttcttggtctggaccatggtagccgccacccacatagtataccccttgctgcaaggatgggtgatgtatgtctcgctcacctcgtttctcatctccttgatgttcctgttgtcttacttgtttggattttacaaaagatttgaatcctggagagttctggacagcctgtaccacgggaccactggcatcctgtacatgagcgctgccgtcctacaagtacatgccacgattgtttctgagaaactgctggacccaagaatttactacattaattcggcagcctcgttcttcgccttcatcgccacgctgctctacattctccatgccttcagcatctattaccactga

SEQ ID NO: 355 - DNA, 990 bp, Homo sapiens
  misc_feature (543)..(543): "n" = a, t, g, or c.
  misc_feature (580)..(580): "n" = a, t, g, or c.
  misc_feature (584)..(584): "n" = a, t, g, or c.
  misc_feature (604)..(604): "n" = a, t, g, or c.
  misc_feature (608)..(608): "n" = a, t, g, or c.
  misc_feature (615)..(615): "n" = a, t, g, or c.
  misc_feature (636)..(636): "n" = a, t, g, or c.
  misc_feature (640)..(640): "n" = a, t, g, or c.
  misc_feature (646)..(646): "n" = a, t, g, or c.
  misc_feature (697)..(697): "n" = a, t, g, or c.
  misc_feature (926)..(926): "n" = a, t, g, or c.
agggagaggcagtgaccatgaaggctgtgctgcttgccctgttgatggcaggcttggccctgcagccaggcactgccctgctgtgctactcctgcaaagcccaggtgagcaacgaggactgcctgcaggtggagaactgcacccagctgggggagcagtgctggaccgcgcgcatccgcgcagttggcctcctgaccgtcatcagcaaaggctgcagcttgaactgcgtggatgactcacaggactactacgtgggcaagaagaacatcacgtgctgtgacaccgacttgtgcaacgccagcggggcccatgccctgcagccggctgccgccatccttgcgctgctccctgcactcggcctgctgctctggggacccggccagctataggctctggggggccccgctgcagcccacactgggtgtggtgccccaggcctttgtgccactcctcacagaacctggcccagtgggagcctgtcctggttcctgaggcacatcctaacgcaagtttgaccatgtatgtttgcaccccttttccccnaaccctgaccttcccatgggccttttccaggattccnaccnggcagatcagttttagtganacanatccgcntgcagatggcccctccaaccntttntgttgntgtttccatggcccagcattttccacccttaaccctgtgttcaggcacttnttcccccaggaagccttccctgcccaccccatttatgaattgagccaggtttggtccgtggtgtcccccgcacccagcaggggacaggcaatcaggagggcccagtaaaggctgagatgaagtggactgagtagaactggaggacaagagttgacgtgagttcctgggagtttccagagatggggcctggaggcctggaggaaggggccaggcctcacatttgtggggntcccgaatggcagcctgagcacagcgtaggcccttaataaacacctgttggataagccaaaaaa

SEQ ID NO: 356 - DNA, 3168 bp, Homo sapiens
gccagagcgtgagccgcgacctccgcgcaggtggtcgcgccggtctccgcggaaatgttgtccaaagttcttccagtcctcctaggcatcttattgatcctccagtcgagggtcgagggacctcagactgaatcaaagaatgaagcctcttcccgtgatgttgtctatggcccccagccccagcctctggaaaatcagctcctctctgaggaaacaaagtcaactgagactgagactgggagcagagttggcaaactgccagaagcctctcgcatcctgaacactatcctgagtaattatgaccacaaactgcgccctggcattggagagaagcccactgtggtcactgttgagatcgccgtcaacagccttggtcctctctctatcctagacatggaatacaccattgacatcatcttctcccagacctggtacgacgaacgcctctgttacaacgacacctttgagtctcttgttctgaatggcaatgtggtgagccagctatggatcccggacaccttttttaggaattctaagaggacccacgagcatgagatcaccatgcccaaccagatggtccgcatctacaaggatggcaaggtgttgtacacaattaggatgaccattgatgccggatgctcactccacatgctcagatttccaatggattctcactcttgccctctatctttctctagcttttcctatcctgagaatgagatgatctacaagtgggaaaatttcaagcttgaaatcaatgagaagaactcctggaagctcttccagtttgattttacaggagtgagcaacaaaactgaaataatcacaaccccagttggtgacttcatggtcatgacgattttcttcaatgtgagcaggcggtttggctatgttgcctttcaaaactatgtcccttcttccgtgaccacgatgctctcctgggtttccttttggatcaagacagagtctgctccagcccggacctctctagggatcacctctgttctgaccatgaccacgttgggcaccttttctcgtaagaatttcccgcgtgtctcctatatcacagccttggatttctatatcgccatctgcttcgtcttctgcttctgcgctctgttggagtttgctgtgctcaacttcctgatctacaaccagacaaaagcccatgcttctcctaaactccgccatcctcgtatcaatagccgtgcccatgcccgtacccgtgcacgttcccgagcctgtgcccgccaacatcaggaagcttttgtgtgccagattgtcaccactgagggaagtgatggagaggagcgcccgtcttgctcagcccagcagccccctagcccaggtagccctgagggtccccgcagcctctgctccaagctggcctgctgtgagtggtgcaagcgttttaagaagtacttctgcatggtccccgattgtgagggcagtacctggcagcagggccgcctctgcatccatgtctaccgcctggataactactcgagagttgttttcccagtgactttcttcttcttcaatgtgctctactggcttgtttgccttaacttgtaggtaccagctggtaccctgtggggcaacctctccagttccccaggaggtccaagccccttgccaagggagttgggggaaagcagcagcagcagcaggagcgactagagtttttcctgccccattccccaaacagaagcttgcagagggtttgtctttgctgcccctctcccctacctggcccattcactgagtcttctcagcagaccatttcaaattattaataaatgggccacctccctcttcttcaaggagcatccgtgatgctcagtgttcaaaaccacagccacttagtgatcagctccctaaaaccatgcctaagtacaggcggattagctatcttccaacaatgctgaccaccagacaattactgcatttttccagaagcccactattgcctttgtagtgctttcggcccagttctggcctcagcctcaaagtgcaccgactagttgcttgcctatacctggcacctcattaagatgctgggcagcagtataacaggaggaagagatccctctcctttggtcagattattatgttctcagttctctctccctgctacccctttctctgcagatagatagacactggcattatccctttaggaagaggggggggcagcaagagagcctatttgggacagcattcctctctctctgctgctgtgacatctccctctccttgctggctccatctttcgtctgcactaccaattcaatgcccttcatccaatgggtatctatttttgtgtgtgattatagtaactactccctgctttatatgccaccctcttccttctctttgacccctgtgactctttctgtaactttcccagtgacttcccctagccctgacccaggcactaggccttggtgacttcctggggccaagaaactaaggaaactcggctttgcaacaggcattactcgccattgattggtgcccacccagggcacactgtcggagttctatcacttgcttgacccctggacccataaaccagtccactgttatacccggggcactctaaccatcacaatcaatcaatcaaattcccttaaatttgtatggcactggaactttggcaaagcacttttgacaagttgtgtctgattggagcttcatgatagccttgtgacatctttagggcaggattcttatccccattttgcagatgaaaaccctgagtcacagatttctgtgggactgtggatctcactggaagctatccaagagcccactgtcaccttctagaccacatgatagggctagacagctcagttcaccatgattctcttctgtcacctctgctggcacaccagtggcaaggcccagaatggcgacctctctttagctcaatttctgggcctgaggtgctcagactgcccccaagatcaaatctctcctggctgtagtaacccagtggaatgaatttggacatgccccaatgcttctatatgctaagtgaaatctgtgtctgtaatttgttggggggtggatagggtggggtctccatctactttttgtcaccatcatctgaaatggggaaatatgtaaataaatatatcagcaaagcaaaaagaaaaaaaaaaa

SEQ ID NO: 357 - DNA, 3329 bp, Homo sapiens
gccagagcgtgagccgcgacctccgcgcaggtggtcgcgccggtctccgcggaaatgttgtccaaagttcttccagtcctcctaggcatcttattgatcctccagtcgagaacatgtatacagagaagtgctcaaatcataagtgtacagctgatgagttgtcaaaaaatgaccacagcggtgtaaagaaagccaaatcaaggacccgaatgtgagcaggacctcagaagccccctttgtcactgcctcccagcaaaggcagcactatccggacttctaacaccatcgggtcgagggacctcagactgaatcaaagaatgaagcctcttcccgtgatgttgtctatggcccccagccccagcctctggaaaatcagctcctctctgaggaaacaaagtcaactgagactgagactgggagcagagttggcaaactgccagaagcctctcgcatcctgaacactatcctgagtaattatgaccacaaactgcgccctggcattggagagaagcccactgtggtcactgttgagatctccgtcaacagccttggtcctctctctatcctagacatggaatacaccattgacatcatcttctcccagacctggtacgacgaacgcctctgttacaacgacacctttgagtctcttgttctgaatggcaatgtggtgagccagctatggatcccggacaccttttttaggaattctaagaggacccacgagcatgagatcaccatgcccaaccagatggtccgcatctacaaggatggcaaggtgttgtacacaattaggatgaccattgatgccggatgctcactccacatgctcagatttccaatggattctcactcttgccctctatctttctctagcttttcctatcctgagaatgagatgatctacaagtgggaaaatttcaagcttgaaatcaatgagaagaactcctggaagctcttccagttggattttacaggagtgagcaacaaaactgaaataatcacaaccccagttggtgacttcatggtcatgacgattttcttcaatgtgagcaggcggtttggctatgttgcctttcaaaactatgtcccttcttccgtgaccacgatgctctcctgggtttccttttggatcaagacagagtctgctccagcccggacctctctagggatcacctctgttctgaccatgaccacgttgggcaccttttctcgtaagaatttcccgcgtgtctcctatatcacagccttggatttctatatcgccatctgcttcgtcttctgcttctgcgctctgttggagtttgctgtgctcaacttcctgatctacaaccagacaaaagcccatgcttctcctaaactccgccatcctcgtatcaatagccgtgcccatgcccgtacccgtgcacgttcccgagcctgtgcccgccaacatcaggaagcttttgtgtgccagattgtcaccactgagggaagtgatggagaggagcgcccgtcttgctcagcccagcagccccctagcccaggtagccctgagggtccccgcagcctctgctccaagctggcctgctgtgagtggtgcaagcgttttaagaagtacttctgcatggtccccgattgtgagggcagtacctggcagcaggcccgcctctgcatccatgtctaccgcctggataactactcgagagttgttttcccagtgactttcttcttcttcaatgtgctctactggcttgtttgccttaacttgtaggtaccagctggtaccctgtggggcaacctctccagttccccaggaggtccaagccccttgccaagggagttgggggaaagcagcagcagcagcaggagcgactagagtttttcctgccccattccccaaacagaagcttgcagagggtttgtctttgctgcccctctcccctacctggcccattcactgagttttctcagcagaccatttcaaattattaataaatgggccacctccctcttcttcaaggagcatccgtgatgctcagtgttcaaaaccacagccacttagtgatcagctccctaaaaccatgcctaagtacaggcggattagctatcttccaacaatgctgaccaccagacaattactgcatttttccagaagcccactattgcctttgcagtgctttcggcccagttctggcctcagcctcaaagtgcaccgactagttgcttgcctatacctggcacctcattaagatgctgggcagcagtataacaggaggaagagatccctctcctttggtcagattattatgttctcagttctctctccctgctacccctttctctgcagatagatagacactggcattatccctttaggaagaggggggggcagcaagagagcctatttgggacagcattcctctctctctgctgctgtgacatctccctctccttgctggctccatctttcgtctgcactaccaattcaatgcccttcatccaatgggtatctatttttgtgtgtgattatagtaactactccctgctttatatgccaccctcttccttctctttgacccctgtgactctttctgtaactttcccagtgacttcccctagccctgacccaggcactaggccttggtgacttcctggggccaagaaactaaggaaactcggctttgcaacaggcattactcgccattgattggtgcccacccagggcacactgtcggagttctatcacttgcttgacccctggacccataaaccagtccactgttatacccggggcactctaaccatcacaatcaatcaatcaaattcccttaaatttgtatggcactggaactttggcaaagcacttttgacaagttgtgtctgattggagcttcatgatagccttgtgacatctttagggcaggattcttatccccattttgcagatgaaaaccctgagtcacagatttctgtgggactgtggatctcactggaagctatccaagagcccactgtcaccttctagaccacatgatagggctagacagctcagttcaccatgattctcttctgtcacctctgctggcacaccagtggcaaggcccagaatggcgacctctctttagctcaatttctgggcctgaggtgctcagactgcccccaagatcaaatctctcctggctgtagtaacccagtggaatgaatttggacatgccccaatgcttctatatgctaagtgaaatctgtgtctgtaatttgttggggggtggatagggtggggtctccatctactttttgtcaccatcatctgaaatggggaaatatgtaaataaatatatcagcaaagc

SEQ ID NO: 358 - DNA, 3232 bp, Homo sapiens
gccagagcgtgagccgcgacctccgcgcaggtggtcgcgccggtctccgcggaaatgttgtccaaagttcttccagtcctcctaggcatcttattgatcctccagtcgagaacatgtatacagagaagtgctcaaatcataagtgtacagctgatgagttgtcaaaaaatgaccacagcggtgtaaagaaagccaaatcaaggacccgaatgtgagcaggacctcagaagccccctttgtcactgcctcccagcaaaggcagcactatccggacttctaacaccatcgggtcgagggacctcagactgaatcaaagaatgaagcctcttcccgtgatgttgtctatggcccccagccccagcctctggaaaatcagctcctctctgaggaaacaaagtcaactgagactgagactgggagcagagttggcaaactgccagaagcctctcgcatcctgaacactatcctgagtaattatgaccacaaactgcgccctggcattggagagaagcccactgtggtcactgttgagatctccgtcaacagccttggtcctctctctatcctagacatggaatacaccattgacatcatcttctcccagacctggaattctaagaggacccacgagcatgagatcaccatgcccaaccagatggtccgcatctacaaggatggcaaggtgttgtacacaattaggatgaccattgatgccggatgctcactccacatgctcagatttccaatggattctcactcttgccctctatctttctctagcttttcctatcctgagaatgagatgatctacaagtgggaaaatttcaagcttgaaatcaatgagaagaactcctggaagctcttccagtttgattttacaggagtgagcaacaaaactgaaataatcacaaccccagttggtgacttcatggtcatgacgattttcttcaatgtgagcaggcggtttggctatgttgcctttcaaaactatgtcccttcttccgtgaccacgatgctctcctgggtttccttttggatcaagacagagtctgctccagcccggacctctctagggatcacctctgttctgaccatgaccacgttgggcaccttttctcgtaagaatttcccgcgtgtctcctatatcacagccttggatttctatatcgccatctgcttcgtcttctgcttctgcgctctgttggagtttgctgtgctcaacttcctgatctacaaccagacaaaagcccatgcttctcctaaactccgccatcctcgtatcaatagccgtgcccatgcccgtacccgtgcacgttcccgagcctgtgcccgccaacatcaggaagcttttgtgtgccagattgtcaccactgagggaagtgatggagaggagcgcccgtcttgctcagcccagcagccccctagcccaggtagccctgagggtccccgcagcctctgctccaagctggcctgctgtgagtggtgcaagcgttttaagaagtacttctgcatggtccccgattgtgagggcagtacctggcagcagggccgcctctgcatccatgtctaccgcctggataactactcgagagttgttttcccagtgactttcttcttcttcaatgtgctctactggcttgtttgccttaacttgtaggtaccagctggtaccctgtggggcaacctctccagttccccaggaggtccaagccccttgccaagggagttgggggaaagcagcagcagcagcaggagcgactagagtttttcctgccccattccccaaacagaagcttgcagagggtttgtctttgctgcccctctcccctacctggcccattcactgagttttctcagcagaccatttcaaattattaataaatgggccacctccctcttcttcaaggagcatccgtgatgctcagtgttcaaaaccacagccacttagtgatcagctccctaaaaccatgcctaagtacaggcggattagctatcttccaacaatgctgaccaccagacaattactgcatttttccagaagcccactattgcctttgcagtgctttcggcccagttctggcctcagcctcaaagtgcaccgactagttgcttgcctatacctggcacctcattaagatgctgggcagcagtataacaggaggaagagatccctctcctttggtcagattattatgttctcagttctctctccctgctacccctttctctgcagatagatagacactggcattatccctttaggaagaggggggggcagcaagagagcctatttgggacagcattcctctctctctgctgctgtgacatctccctctccttgctggctccatctttcgtctgcactaccaattcaatgcccttcatccaatgggtatctatttttgtgtgtgattatagtaactactccctgctttatatgccaccctcttccttctctttgacccctgtgactctttctgtaactttcccagtgacttcccctagccctgaccaggcactaggccttggtgacttcctggggccaagaaactaaggaaactcggctttgcaacaggcattactcgccattgattggtgcccacccagggcacactgtcggagttctatcacttgcttgacccctggacccataaaccagtccactgttatacccggggcactctaaccatcacaatcaatcaatcaaattcccttaaatttgtatggcactggaactttggcaaagcacttttgacaagttgtgtctgattggagcttcatgatagccttgtgacatctttagggcaggattcttatccccattttgcagatgaaaaccctgagtcacagatttctgtgggactgtggatctcactggaagctatccaagagcccactgtcaccttctagaccacatgatagggctagacagctcagttcaccatgattctcttctgtcacctctgctggcacaccagtggcaaggcccagaatggcgacctctctttagctcaatttctgggcctgaggtgctcagactgcccccaagatcaaatctctcctggctgtagtaacccagtggaatgaatttggacatgccccaatgcttctatatgctaagtgaaatctgtgtctgtaatttgttggggggtggatagggtggggtctccatctactttttgtcaccatcatctgaaatggggaaatatgtaaataaatatatcagcaaagc

SEQ ID NO: 359 - DNA, 4065 bp, Homo sapiens
gccagagcgtgagccgcgacctccgcgcaggtggtcgcgccggtctccgcggaaatgttgtccaaagttcttccagtcctcctaggcatcttattgatcctccagtcgagaacatgtatacagagaagtgctcaaatcataagtgtacagctgatgagttgtcaaaaaatgaccacagcggtgtaaagaaagccaaatcaaggacccgaatgtgagcaggacctcagaagccccctttgtcactgcctcccagcaaaggcagcactatccggacttctaacaccatcggtgagtttcataccttggcagatggcctttaacatttttgtttaattcaattattcttactaatcttcttctttttcttggctgtggtgcatggctgtggagctcagggtggactcctgttgggcagccagttcctggatggctgtctgtgggtggaggactcctgcctttcctgtttagacacccacaaaggctgctctttagcctccttcccttcatccccttcccctgcccccagtgcaacgagtattacacaaccaacaaaaccgcaaaatattcccacaattttctggtcctctctgggagaggccgctctggcttttcctctcagccctggccctctgcctgctcctcactcctggttggtgctggtcaggctgactagaggccaaggcgaccaacactaggcaaacgcggccagcgctcagacataaatgccctcttcatttcacgtgtaacattcttttaaaatctaggtcttggttttgttgattttttcttaaataaaagagtgatcataaaagagggacagcatagaaagtccccaaagagcagcaaggttttaaagaaattcacaagcctaatctgtcactgtcttataatttgctattaccagtcacaatttaactaggttttgtgttgaaaacttgttttggtttgcttctgtcccaagaggcactagctggggcccctacagagtgcagggcagagcttcatttttcgtttgaatgttctagggtcgagggacctcagactgaatcaaagaatgaagcctcttcccgtgatgttgtctatggcccccagccccagcctctggaaaatcagctcctctctgaggaaacaaagtcaactgagactgagactgggagcagagttggcaaactgccagaagcctctcgcatcctgaacactatcctgagtaattatgaccacaaactgcgccctggcattggagagaagcccactgtggtcactgttgagatctccgtcaacagccttggtcctctctctatcctagacatggaatacaccattgacatcatcttctcccagacctggtacgacgaacgcctctgttacaacgacacctttgagtctcttgttctgaatggcaatgtggtgagccagctatggatcccggacaccttttttaggaattctaagaggacccacgagcatgagatcaccatgcccaaccagatggtccgcatctacaaggatggcaaggtgttgtacacaattaggatgaccattgatgccggatgctcactccacatgctcagatttccaatggattctcactcttgccctctatctttctctagcttttcctatcctgagaatgagatgatctacaagtgggaaaatttcaagcttgaaatcaatgagaagaactcctggaagctcttccagtttgattttacaggagtgagcaacaaaactgaaataatcacaaccccagttggtgacttcatggtcatgacgattttcttcaatgtgagcaggcggtttggctatgttgcctttcaaaactatgtcccttcttccgtgaccacgatgctctcctgggtttccttttggatcaagacagagtctgctccagcccggacctctctagggatcacctctgttctgaccatgaccacgttgggcaccttttctcgtaagaatttcccgcgtgtctcctatatcacagccttggatttctatatcgccatctgcttcgtcttctgcttctgcgctctgttggagtttgctgtgctcaacttcctgatctacaaccagacaaaagcccatgcttctcctaaactccgccatcctcgtatcaatagccgtgcccatgcccgtacccgtgcacgttcccgagcctgtgcccgccaacatcaggaagcttttgtgtgccagattgtcaccactgagggaagtgatggagaggagcgcccgtcttgctcagcccagcagccccctagcccaggtagccctgagggtccccgcagcctctgctccaagctggcctgctgtgagtggtgcaagcgttttaagaagtacttctgcatggtccccgattgtgagggcagtacctggcagcagggccgcctctgcatccatgtctaccgcctggataactactcgagagttgttttcccagtgactttcttcttcttcaatgtgctctactggcttgtttgccttaacttgtaggtaccagctggtaccctgtggggcaacctctccagttccccaggaggtccaagccccttgccaagggagttgggggaaagcagcagcagcagcaggagcgactagagtttttcctgccccattccccaaacagaagcttgcagagggtttgtctttgctgcccctctcccctacctggcccattcactgagttttctcagcagaccatttcaaattattaataaatgggccacctccctcttcttcaaggagcatccgtgatgctcagtgttcaaaaccacagccacttagtgatcagctccctaaaaccatgcctaagtacaggcggattagctatcttccaacaatgctgaccaccagacaattactgcatttttccagaagcccactattgcctttgcagtgctttcggcccagttctggcctcagcctcaaagtgcaccgactagttgcttgcctatacctggcacctcattaagatgctgggcagcagtataacaggaggaagagatccctctcctttggtcagattattatgttctcagttctctctccctgctacccctttctctgcagatagatagacactggcattatccctttaggaagaggggggggcagcaagagagcctatttgggacagcattcctctctctctgctgctgtgacatctccctctccttgctggctccatctttcgtctgcactaccaattcaatgcccttcatccaatgggtatctatttttgtgtgtgattatagtaactactccctgctttatatgccaccctcttccttctctttgacccctgtgactctttctgtaactttcccagtgacttcccctagccctgaccaggcactaggccttggtgacttcctggggccaagaaactaaggaaactcggctttgcaacaggcattactcgccattgattggtgcccacccagggcacactgtcggagttctatcacttgcttgacccctggacccataaaccagtccactgttatacccggggcactctaaccatcacaatcaatcaatcaaattcccttaaatttgtatggcactggaactttggcaaagcacttttgacaagttgtgtctgattggagcttcatgatagccttgtgacatctttagggcaggattcttatccccattttgcagatgaaaaccctgagtcacagatttctgtgggactgtggatctcactggaagctatccaagagcccactgtcaccttctagaccacatgatagggctagacagctcagttcaccatgattctcttctgtcacctctgctggcacaccagtggcaaggcccagaatggcgacctctctttagctcaatttctgggcctgaggtgctcagactgcccccaagatcaaatctctcctggctgtagtaacccagtggaatgaatttggacatgccccaatgcttctatatgctaagtgaaatctgtgtctgtaatttgttggggggtggatagggtggggtctccatctactttttgtcaccatcatctgaaatggggaaatatgtaaataaatatatcagcaaagc

SEQ ID NO: 360 - DNA, 2035 bp, Homo sapiens
tgcaagtctgcagccagcagagctcacagttgttgcaaagtgctcagcactaagggagccagcgcacagcacagccaggaaggcgagcgagcccagccagcccagccagcccagccagcccggaggtcatttgattgcccgcctcagaacgatggatctgcatctcttcgactactcagagccagggaacttctcggacatcagctggccatgcaacagcagcgactgcatcgtggtggacacggtgatgtgtcccaacatgcccaacaaaagcgtcctgctctacacgctctccttcatttacattttcatcttcgtcatcggcatgattgccaactccgtggtggtctgggtgaatatccaggccaagaccacaggctatgacacgcactgctacatcttgaacctggccattgccgacctgtgggttgtcctcaccatcccagtctgggtggtcagtctcgtgcagcacaaccagtggcccatgggcgagctcacgtgcaaagtcacacacctcatcttctccatcaacctcttcggcagcattttcttcctcacgtgcatgagcgtggaccgctacctctccatcacctacttcaccaacacccccagcagcaggaagaagatggtacgccgtgtcgtctgcatcctggtgtggctgctggccttctgcgtgtctctgcctgacacctactacctgaagaccgtcacgtctgcgtccaacaatgagacctactgccggtccttctaccccgagcacagcatcaaggagtggctgatcggcatggagctggtctccgttgtcttgggctttgccgttcccttctccattatcgctgtcttctacttcctgctggccagagccatctcggcgtccagtgaccaggagaagcacagcagccggaagatcatcttctcctacgtggtggtcttccttgtctgctggctgccctaccacgtggcggtgctgctggacatcttctccatcctgcactacatccctttcacctgccggctggagcacgccctcttcacggccctgcatgtcacacagtgcctgtcgctggtgcactgctgcgtcaaccctgtcctctacagcttcatcaatcgcaactacaggtacgagctgatgaaggccttcatcttcaagtactcggccaaaacagggctcaccaagctcatcgatgcctccagagtctcagagacggagtactctgccttggagcagagcaccaaatgatctgccctggagaggctctgggacgggtttacttgtttttgaacagggtgatgggccctatggttttctagagcaaagcaaagtagcttcgggtcttgatgcttgagtagagtgaagaggggagcacgtgccccctgcatccattctctctttctcttgatgacgcagctgtcatttggctgtgcgtgctgacagttttgcaacaggcagagctgtgtcgcacagcagtgctgtgcgtcagagccagctgaggacaggcttgcctggacttctgtaagataggattttctgtgtttcctgaattttttatatggtgatttgtatttaaattttaagactttattttctcactattggtgtaccttataaatgtatttgaaagttaaatatattttaaatattgtttgggaggcatagtgctgacatatattcagagtgttgtagttttaaggttagcgtgacttcagttttgactaaggatgacactaattgttagctgttttgaaattatatatatataaatatatataaatatataaatatatgccagtcttggctgaaatgttttatttaccatagttttatatctgtgtggtgttttgtaccggcacgggatatggaacgaaaactgctttgtaatgcagtttgtgacattaatagtattgtaaagttacattttaaaataaacaaaaaactgttctggactgcaaatctgcacacacaacgaacagttgcatttcagagagttctctcaatttgtaagttatttttttttaataaagatttttgtttcct

SEQ ID NO: 361 - DNA, 1230 bp, Homo sapiens
agacgttcgcacacctgggtgccagcgccccagaggtcccgggacagcccgaggcgccgcgcccgccgccccgagctccccaagccttcgagagcggcgcacactcccggtctccactcgctcttccaacacccgctcgttttgcggcagctcgtgtcccagagaccgagttgccccagagaccgagacgccgccgctgcgaaggaccaatgagagccccgctgctaccgccggcgccggtggtgctgtcgctcttgatactcggctcaggccattatgctgctggattggacctcaatgacacctactctgggaagcgtgaaccattttctggggaccacagtgctgatggatttgaggttacctcaagaagtgagatgtcttcagggagtgagatttcccctgtgagtgaaatgccttctagtagtgaaccgtcctcgggagccgactatgactactcagaagagtatgataacgaaccacaaatacctggctatattgtcgatgattcagtcagagttgaacaggtagttaagcccccccaaaacaagacggaaagtgaaaatacttcagataaacccaaaagaaagaaaaagggaggcaaaaatggaaaaaatagaagaaacagaaagaagaaaaatccatgtaatgcagaatttcaaaatttctgcattcacggagaatgcaaatatatagagcacctggaagcagtaacatgcaaatgtcagcaagaatatttcggtgaacggtgtggggaaaagtccatgaaaactcacagcatgattgacagtagtttatcaaaaattgcattagcagccatagctgcctttatgtctgctgtgatcctcacagctgttgctgttattacagtccagcttagaagacaatacgtcaggaaatatgaaggagaagctgaggaacgaaagaaacttcgacaagagaatggaaatgtacatgctatagcataactgaagataaaattacaggatatcacattggagtcactgccaagtcatagccataaatgatgagtcggtcctctttccagtggatcataagacaatggaccctttttgttatgatggttttaaactttcaattgtcactttttatgctatttctgtatataaaggtgcacgaaggtaaaaagtattttttcaagttgtaaataatttatttaatatttaatggaagtgtatttattttacagctcattaaacttttttaacc

SEQ ID NO: 362 - DNA, 4404 bp, Homo sapiens
actcggccggcagcggaccgcagccaccagccgcccgcgccctccagccccgtccgggagtccccggcccgctgcggtgccgtgagtacctccaaccccctgcgccccggaggaggccgaggggcttagccaccagggctcggaagtgggggccgaatccggtgcgagacccaaggagaggggagcagagccggagttggggagactgtggctgaaaactgtgtcttcctggagactaggctggcattttgactttggggttgctgaaaagccaggagtcaaaatgactgagcgctttgactgccaccattgcaacgaatctctctttggcaagaggtacatcctgcgggaggagagcccctactgcgtggtgtgctttgagaccctgttcgccaacacctgcgaggagtgtgggaagcccatcggctgtgactgcaaggtgcaacattagaggaaatcaatcagcactgggactggctggaacaaaatctcctccacaccttgtctgtctttgataataaagatgacattgccagttttgtcaaagggaaggtaaagccgtgtgtctgggtggctgacggatgacacagctgagccattctcctcatcaggtgtgactgtcgttgaagcagcgcacacttctcgggggcctgtgcacctcagtccctcctgcttcctgtcccttgcaccccctgccttcccattgctggctcactgagcagggactgtcatctctgtgtgtcaggctctgatagccgaggagaccagcagcaggctcgccgagcaggaggaggaacccgagaaattccgagaagccctggtgaagttcgaggccaggttcaacttccccgaggcggagaagctggtcacctactactcctgctgctgttggaagggcagggtgccccgccagggctggctgtacctcagcatcaaccacctctgcttctactccttcttcctgggcaaggaacttaaacttgtggttccgtgggttgatatccagaaattagaaagaacgtccaatgtctttctgacggataccatccgaatcaccacgcagaataaggagcgtgacttctccatgttcctgaacctggatgaggtgtttaaggtcatggagcagctggccgacgtgacgctgcgaaggctgctggataatgaggtctttgacctcgaccccgatctgcaggagccgagccagatcaccaagagggacctggaagccagagcacagaatgagttcttccgggctttcttcaggttgccgaggaaggagaagctgcacgcggttgtggactgttcgctctggacgccgttcagtcgctgtcacaccgcggggcggatgttcgcctctgacagctacatctgctttgccagcagagaagatggctgctgtaagatcatcctgccactcagagaggtggtgagcatcgagaagatggaggacacgagcctgctgccgcatcccatcattgtcagtatcagaagcaaggtggccttccagttcattgagctccgggaccgagacagcctggtggaggcgctgcttgcgaggttgaagcaggtccacgccaaccaccccgtgcactacgacacctctgcggatgatgacatggcttcactcgtgtttcattcaacaagcatgtgcagtgaccacagatttggggatcttgaaatgatgtcttctcaaaatagcgaggagagtgagaaagagaagagcccgctgatgcaccccgatgccctggtcaccgccttccagcagtcaggcagccagagccctgactcccgaatgtccagagaacagataaaaataagcctgtggaatgaccactttgtggaatacggcagaaccgtgtgtatgtttcgcacagagaagattcggaagctcgtagccatgggcatccctgaatctttgcgagggagactctggcttctcttctcagatgcggtgacggatcttgcctcacaccctggttactacgggaatctggtggaggagtccctggggaaatgctgcctggtaaccgaggagatagaacgagacctgcaccgctccctgccagagcaccccgccttccagaacgaaacgggaattgctgctttgaggagagtcttgacggcctatgcccaccggaaccccaagattggatactgccagtccatgaacatcctgacctccgtgctgctgctgtacaccaaggaggaggaagccttctggctgttggttgctgtgtgtgagcggatgctgcccgattacttcaaccaccgagtgatcggggcacaagttgaccagtctgtcttcgaggagctcatcaagggtcatctcccagagctggcagagcacatgaacgacctctcagccctggcgtctgtctctctctcgtggttcctgaccctgttcctcagcatcatgcctctagagagtgcggtgaatgtggtagactgcttcttctatgatggcatcaaagccatcttccagctgggactggctgtgcttgaggccaatgctgaggacctgtgcagcagcaaggatgatggccaggccttgatgatcctcagcaggtttctagatcacattaagaatgaggacagcccagggcccccagttggcagccaccatgcctttttctccgacgaccaggagccctaccctgtgactgatatttcggacctgatccgggattcctatgagaaatttggagaccagtctgtggagcagatcgagcacctacgttacaagcacaggatcagggtcctccaaggccacgaggacaccacaaagcagaacgtgcttcgagtcgttatcccggaagtctcaattcttcctgaagacctagaggagctctacgacttattcaagagagaacatatgatgagctgttactgggagcagcccaggcccatggcctcacgccacgaccccagccggccctatgctgagcagtaccgcatagacgcccggcagtttgcacacctgtttcagctagtctcgccctggacctgcggggcccacacggagatcctcgccgaaaggacgttcaggctcttggatgacaacatggaccagctcatcgagttcaaagcgtttgtgagctgcctcgatattatgtataatggagaaatgaatgagaagattaaactattatacaggcttcatatccctccagcactcactgaaaatgaccgagacagccagtcgccgttgaggaatcctctgttgtcaacatcgagacccctggttttcgggaaacccaatggtgatgcagttgattatcagaaacagctgaagcagatgattaaggatttagccaaagaaaaagataaaactgagaaagaattgcccaaaatgagccagagagaatttatccagttctgtaaaactctgtacagtatgttccatgaagatccagaagaaaatgatttgtatcaagccatcgccacagtcaccacactgctgctgcagatcggggaggtggggcagcgaggcagcagctctggaagctgctcccaggagtgtggggaggagctgcgggcttcagctccttctcctgaggactcggtttttgcagacactgggaagacgccccaggactcccaggcacttccagaggcggcagaaagggactggactgtctcccttgaacatattttagcttcacttctgactgaacagtcattagtcaacttttttgaaaagccactggacatgaaatccaaacttgaaaatgccaagatcaatcagtacaatctcaaaacttttgaaatgagccaccaatcacaatctgaacttaagctgagtaacttgtagcaagacagcagctgctatgcacactggagtccaccataccaaagcacgaaccagactgtttcttggggtcagccctaaaccgagatttcagtctaccttaccaatggggcatctggctaaacaacctgacaaactgtggccaggggaaccgacacaaccctcaagcatttctatgtattgagaattgtcagtgccctaaggtatccattggttcccttgatgccaacttacaatttttaccggatttgctgaaatgggcacttctgctgtgatgctagtgttgattttgctctcagatgaacacaatgtctcatactaaccaagaagcaagaaaagccccatgctttcatttttcacttggagtgacaatgggagaggtcaggaatcaagttcactttcaagatctaagggagtccactatctgtgcaattgtatttggcttttttttgcactgtttcaatgctggtaattgaaaccattttaatatatttggttgtattcactttatatgtccttccaaaaatgttgttgtgtacataccatgctttcaatgttggcttccaagttttttaataagaaactttttgtttttt

SEQ ID NO: 363 - DNA, 2669 bp, Homo sapiens
cagatgccagaagaacactgttgctcttggtggacgggcccagaggaattcagagttaaaccttgagtgcctgcgtccgtgagaattcagcatggaatgtctctactatttcctgggatttctgctcctggctgcaagattgccacttgatgccgccaaacgatttcatgatgtgctgggcaatgaaagaccttctgcttacatgagggagcacaatcaattaaatggctggtcttctgatgaaaatgactggaatgaaaaactctacccagtgtggaagcggggagacatgaggtggaaaaactcctggaagggaggccgtgtgcaggcggtcctgaccagtgactcaccagccctcgtgggctcaaatataacatttgcggtgaacctgatattccctagatgccaaaaggaagatgccaatggcaacatagtctatgagaagaactgcagaaatgaggctggtttatctgctgatccatatgtttacaactggacagcatggtcagaggacagtgacggggaaaatggcaccggccaaagccatcataacgtcttccctgatgggaaaccttttcctcaccaccccggatggagaagatggaatttcatctacgtcttccacacacttggtcagtatttccagaaattgggacgatgttcagtgagagtttctgtgaacacagccaatgtgacacttgggcctcaactcatggaagtgactgtctacagaagacatggacgggcatatgttcccatcgcacaagtgaaagatgtgtacgtggtaacagatcagattcctgtgtttgtgactatgttccagaagaacgatcgaaattcatccgacgaaaccttcctcaaagatctccccattatgtttgatgtcctgattcatgatcctagccacttcctcaattattctaccattaactacaagtggagcttcggggataatactggcctgtttgtttccaccaatcatactgtgaatcacacgtatgtgctcaatggaaccttcagccttaacctcactgtgaaagctgcagcaccaggaccttgtccgccaccgccaccaccacccagaccttcaaaacccaccccttctttaggacctgctggtgacaaccccctggagctgagtaggattcctgatgaaaactgccagattaacagatatggccactttcaagccaccatcacaattgtagagggaatcttagaggttaacatcatccagatgacagacgtcctgatgccggtgccatggcctgaaagctccctaatagactttgtcgtgacctgccaagggagcattcccacggaggtctgtaccatcatttctgaccccacctgcgagatcacccagaacacagtctgcagccctgtggatgtggatgagatgtgtctgctgactgtgagacgaaccttcaatgggtctgggacgtactgtgtgaacctcaccctgggggatgacacaagcctggctctcacgagcaccctgatttctgttcctgacagagacccagcctcgcctttaaggatggcaaacagtgccctgatctccgttggctgcttggccatatttgtcactgtgatctccctcttggtgtacaaaaaacacaaggaatacaacccaatagaaaatagtcctgggaatgtggtcagaagcaaaggcctgagtgtctttctcaaccgtgcaaaagccgtgttcttcccgggaaaccaggaaaaggatccgctactcaaaaaccaagaatttaaaggagtttcttaaatttcgaccttgtttctgaagctcacttttcagtgccattgatgtgagatgtgctggagtggctattaacctttttttcctaaagattattgttaaatagatattgtggtttggggaagttgaattttttataggttaaatgtcattttagagatggggagagggattatactgcaggcagcttcagccatgttgtgaaactgataaaagcaacttagcaaggcttcttttcattattttttatgtttcacttataaagtcttaggtaactagtaggatagaaacactgtgtcccgagagtaaggagagaagctactattgattagagcctaacccaggttaactgcaagaagaggcgggatactttcagctttccatgtaactgtatgcataaagccaatgtagtccagtttctaagatcatgttccaagctaactgaatcccacttcaatacacactcatgaactcctgatggaacaataacaggcccaagcctgtggtatgatgtgcacacttgctagactcagaaaaaatactactctcataaatgggtgggagtattttggtgacaacctactttgcttggctgagtgaaggaatgatattcatatattcatttattccatggacatttagttagtgctttttatataccaggcatgatgctgagtgacactcttgtgtatatttccaaatttttgtatagtcgctgcacatatttgaaatcatatattaagactttccaaagatgaggtccctggtttttcatggcaacttgatcagtaaggatttcacctctgtttgtaactaaaaccatctactatatgttagacatgacattctttttctctccttcctgaaaaataaagtgtgggaagagacaaaaaaaaaaaaa

SEQ ID NO: 364 - DNA, 8091 bp, Homo sapiens
acgcggcgcggaggctggcccgggacgcgcccggagcccagggaaggagggaggaggggagggtcgcggccggccgccatggggccgggggcccgtggccgccgccgccgccgtcgcccgatgtcgccgccaccgccaccgccacccgtgcgggcgctgcccctgctgctgctgctagcggggccgggggctgcagcccccccttgcctggacggaagcccgtgtgcaaatggaggtcgttgcacccagctgccctcccgggaggctgcctgcctgtgcccgcctggctgggtgggtgagcggtgtcagctggaggacccctgtcactcaggcccctgtgctggccgtggtgtctgccagagttcagtggtggctggcaccgcccgattctcatgccggtgcccccgtggcttccgaggccctgactgctccctgccagatccctgcctcagcagcccttgtgcccacggtgcccgctgctcagtggggcccgatggacgcttcctctgctcctgcccacctggctaccagggccgcagctgccgaagcgacgtggatgagtgccgggtgggtgagccctgccgccatggtggcacctgcctcaacacacctggctccttccgctgccagtgtccagctggctacacagggccactatgtgagaaccccgcggtgccctgtgcgccctcaccatgccgtaacgggggcacctgcaggcagagtggcgacctcacttacgactgtgcctgtcttcctgggtttgagggtcagaattgtgaagtgaacgtggacgactgtccaggacaccgatgtctcaatggggggacatgcgtggatggcgtcaacacctataactgccagtgccctcctgagtggacaggccagttctgcacggaggacgtggatgagtgtcagctgcagcccaacgcctgccacaatgggggtacctgcttcaacacgctgggtggccacagctgcgtgtgtgtcaatggctggacaggtgagagctgcagtcagaatatcgatgactgtgccacagccgtgtgcttccatggggccacctgccatgaccgcgtggcttctttctactgtgcctgccccatgggcaagactggcctcctgtgtcacctggatgacgcctgtgtcagcaacccctgccacgaggatgctatctgtgacacaaatccggtgaacggccgggccatttgcacctgtcctcccggcttcacgggtggggcatgtgaccaggatgtggacgagtgctctatcggcgccaacccctgcgagcacttgggcaggtgcgtgaacacgcagggctccttcctgtgccagtgcggtcgtggctacactggacctcgctgtgagaccgatgtcaacgagtgtctgtcggggccctgccgaaaccaggccacgtgcctcgaccgcataggccagttcacctgtatctgtatggcaggcttcacaggaacctattgcgaggtggacattgacgagtgtcagagtagcccctgtgtcaacggtggggtctgcaaggaccgagtcaatggcttcagctgcacctgcccctcgggcttcagcggctccacgtgtcagctggacgtggacgaatgcgccagcacgccctgcaggaatggcgccaaatgcgtggaccagcccgatggctacgagtgccgctgtgccgagggctttgagggcacgctgtgtgatcgcaacgtggacgactgctcccctgacccatgccaccatggtcgctgcgtggatggcatcgccagcttctcatgtgcctgtgctcctggctacacgggcacacgctgcgagagccaggtggacgaatgccgcagccagccctgccgccatggcggcaaatgcctagacctggtggacaagtacctctgccgctgcccttctgggaccacaggtgtgaactgcgaagtgaacattgacgactgtgccagcaacccctgcacctttggagtctgccgtgatggcatcaaccgctacgactgtgtctgccaacctggcttcacagggcccctttgtaacgtggagatcaatgagtgtgcttccagcccatgcggcgagggaggttcctgtgtggatggggaaaatggcttccgctgcctctgcccgcctggctccttgcccccactctgcctccccccgagccatccctgtgcccatgagccctgcagtcacggcatctgctatgatgcacctggcgggttccgctgtgtgtgtgagcctggctggagtggcccccgctgcagccagagcctggcccgagacgcctgtgagtcccagccgtgcagggccggtgggacatgcagcagcgatggaatgggtttccactgcacctgcccgcctggtgtccagggacgtcagtgtgaactcctctccccctgcaccccgaacccctgtgagcatgggggccgctgcgagtctgcccctggccagctgcctgtctgctcctgcccccagggctggcaaggcccacgatgccagcaggatgtggacgagtgtgctggccccgcaccctgtggccctcatggtatctgcaccaacctggcagggagtttcagctgcacctgccatggagggtacactggcccttcctgtgatcaggacatcaatgactgtgaccccaacccatgcctgaacggtggctcgtgccaagacggcgtgggctccttttcctgctcctgcctccctggtttcgccggcccacgatgcgcccgcgatgtggatgagtgcctgagcaacccctgcggcccgggcacctgtaccgaccacgtggcctccttcacctgcacctgcccgccgggctacggaggcttccactgcgaacaggacctgcccgactgcagccccagctcctgcttcaatggcgggacctgtgtggacggcgtgaactcgttcagctgcctgtgccgtcccggctacacaggagcccactgccaacatgaggcagacccctgcctctcgcggccctgcctacacgggggcgtctgcagcgccgcccaccctggcttccgctgcacctgcctcgagagcttcacgggcccgcagtgccagacgctggtggattggtgcagccgccagccttgtcaaaacgggggtcgctgcgtccagactggggcctattgcctttgtccccctggatggagcggacgcctctgtgacatccgaagcttgccctgcagggaggccgcagcccagatcggggtgcggctggagcagctgtgtcaggcgggtgggcagtgtgtggatgaagacagctcccactactgcgtgtgcccagagggccgtactggtagccactgtgagcaggaggtggacccctgcttggcccagccctgccagcatggggggacctgccgtggctatatggggggctacatgtgtgagtgtcttcctggctacaatggtgataactgtgaggacgacgtggacgagtgtgcctcccagccctgccagcacgggggttcatgcattgacctcgtggcccgctatctctgctcctgtcccccaggaacgctgggggtgctctgcgagattaatgaggatgactgcggcccaggcccaccgctggactcagggccccggtgcctacacaatggcacctgcgtggacctggtgggtggtttccgctgcacctgtcccccaggatacactggtttgcgctgcgaggcagacatcaatgagtgtcgctcaggtgcctgccacgcggcacacacccgggactgcctgcaggacccaggcggaggtttccgttgcctttgtcatgctggcttctcaggtcctcgctgtcagactgtcctgtctccctgcgagtcccagccatgccagcatggaggccagtgccgtcctagcccgggtcctgggggtgggctgaccttcacctgtcactgtgcccagccgttctggggtccgcgttgcgagcgggtggcgcgctcctgccgggagctgcagtgcccggtgggcgtcccatgccagcagacgccccgcgggccgcgctgcgcctgccccccagggttgtcgggaccctcctgccgcagcttcccggggtcgccgccgggggccagcaacgccagctgcgcggccgccccctgtctccacgggggctcctgccgccccgcgccgctcgcgcccttcttccgctgcgcttgcgcgcagggctggaccgggccgcgctgcgaggcgcccgccgcggcacccgaggtctcggaggagccgcggtgcccgcgcgccgcctgccaggccaagcgcggggaccagcgctgcgaccgcgagtgcaacagcccaggctgcggctgggacggcggcgactgctcgctgagcgtgggcgacccctggcggcaatgcgaggcgctgcagtgctggcgcctcttcaacaacagccgctgcgaccccgcctgcagctcgcccgcctgcctctacgacaacttcgactgccacgccggtggccgcgagcgcacttgcaacccggtgtacgagaagtactgcgccgaccactttgccgacggccgctgcgaccagggctgcaacacggaggagtgcggctgggatgggctggattgtgccagcgaggtgccggccctgctggcccgcggcgtgctggtgctcacagtgctgctgccgccggaggagctactgcgttccagcgccgactttctgcagcggctcagcgccatcctgcgcacctcgctgcgcttccgcctggacgcgcacggccaggccatggtcttcccttaccaccggcctagtcctggctccgaaccccgggcccgtcgggagctggcccccgaggtgatcggctcggtagtaatgctggagattgacaaccggctctgcctgcagtcgcctgagaatgatcactgcttccccgatgcccagagcgccgctgactacctgggagcgttgtcagcggtggagcgcctggacttcccgtacccactgcgggacgtgcggggggagccgctggagcctccagaacccagcgtcccgctgctgccactgctagtggcgggcgctgtcttgctgctggtcattctcgtcctgggtgtcatggtggcccggcgcaagcgcgagcacagcaccctctggttccctgagggcttctcactgcacaaggacgtggcctctggtcacaagggccggcgggaacccgtgggccaggacgcgctgggcatgaagaacatggccaagggtgagagcctgatgggggaggtggccacagactggatggacacagagtgcccagaggccaagcggctaaaggtagaggagccaggcatgggggctgaggaggctgtggattgccgtcagtggactcaacaccatctggttgctgctgacatccgcgtggcaccagccatggcactgacaccaccacagggcgacgcagatgctgatggcatggatgtcaatgtgcgtggcccagatggcttcaccccgctaatgctggcttccttctgtgggggggctctggagccaatgccaactgaagaggatgaggcagatgacacatcagctagcatcatctccgacctgatctgccagggggctcagcttggggcacggactgaccgtactggcgagactgctttgcacctggctgcccgttatgcccgtgctgatgcagccaagcggctgctggatgctggggcagacaccaatgcccaggaccactcaggccgcactcccctgcacacagctgtcacagccgatgcccagggtgtcttccagattctcatccgaaaccgctctacagacttggatgcccgcatggcagatggctcaacggcactgatcctggcggcccgcctggcagtagagggcatggtggaagagctcatcgccagccatgctgatgtcaatgctgtggatgagcttgggaaatcagccttacactgggctgcggctgtgaacaacgtggaagccactttggccctgctcaaaaatggagccaataaggacatgcaggatagcaaggaggagacccccctattcctggccgcccgcgagggcagctatgaggctgccaagctgctgttggaccactttgccaaccgtgagatcaccgaccacctggacaggctgccgcgggacgtagcccaggagagactgcaccaggacatcgtgcgcttgctggatcaacccagtgggccccgcagcccccccggtccccacggcctggggcctctgctctgtcctccaggggccttcctccctggcctcaaagcggcacagtcggggtccaagaagagcaggaggccccccgggaaggcggggctggggccgcaggggccccgggggcggggcaagaagctgacgctggcctgcccgggccccctggctgacagctcggtcacgctgtcgcccgtggactcgctggactccccgcggcctttcggtgggccccctgcttcccctggtggcttcccccttgaggggccctatgcagctgccactgccactgcagtgtctctggcacagcttggtggcccaggccgggcaggtctagggcgccagccccctggaggatgtgtactcagcctgggcctgctgaaccctgtggctgtgcccctcgattgggcccggctgcccccacctgcccctccaggcccctcgttcctgctgccactggcgccgggaccccagctgctcaacccagggacccccgtctccccgcaggagcggcccccgccttacctggcagtcccaggacatggcgaggagtacccggtggctggggcacacagcagccccccaaaggcccgcttcctgcgggttcccagtgagcacccttacctgaccccatcccccgaatcccctgagcactgggccagcccctcacctccctccctctcagactggtccgaatccacgcctagcccagccactgccactggggccatggccaccaccactggggcactgcctgcccagccacttcccttgtctgttcccagctcccttgctcaggcccagacccagctggggccccagccggaagttacccccaagaggcaagtgttggcctgagacgctcgtcagttcttagatcttgggggcctaaagagacccccgtcctgcctcctttctttctctgtctcttccttccttttagtctttttcatcctcttctctttccaccaaccctcctgcatccttgccttgcagcgtgaccgagataggtcatcagcccagggcttcagtcttcctttatttataatgggtgggggctaccacccaccctctcagtcttgtgaagagtctgggacctccttcttccccacttctctcttccctcattcctttctctctccttctggcctctcatttccttacactctgacatgaatgaattattattatttttctttttctttttttttttacattttgtatagaaacaaattcatttaaacaaacttattattattattttttacaaaatatatatatggagatgctccctccccctgtgaaccccccagtgcccccgtggggctgagtctgtgggcccattcggccaagctggattctgtgtacctagtacacaggcatgactgggatcccgtgtaccgagtacacgacccaggtatgtaccaagtaggcacccttgggcgcacccactggggccaggggtcgggggagtgttgggagcctcctccccaccccacctccctcacttcactgcattccagattggacatgttccatagccttgctggggaagggcccactgccaactccctctgccccagccccacccttggccatctccctttgggaactagggggctgctggtgggaaatgggagccagggcagatgtatgcattcctttatgtccctgtaaatgtgggactacaagaagaggagctgcctgagtggtactttctcttcctggtaatcctctggcccagccttatggcagaatagaggtatttttaggctatttttgtaatatggcttctggtcaaaatccctgtgtagctgaattcccaagccctgcattgtacagccccccactcccctcaccacctaataaaggaatagttaacactcaaaaaaaaaaaaaaaaaaa

SEQ ID NO: 365 - DNA, 4267 bp, Homo sapiens
ctccgaggaggggtggggacggtcctgacggtggggacatcaggctgccccgcagtaccagggagcgacttgaagtgcccatgccgcttgctccgggagaagcccaggtgtggcctcactcacatcccactctgagtccaaatgttctctccctggaagatatcaatgtttctgtctgttcgtgaggactccgtgcccaccacggcctctttcagcgccgacatgctcaatgtcaccttgcaagggcccactcttaacgggacctttgcccagagcaaatgcccccaagtggagtggctgggctggctcaacaccatccagccccccttcctctgggtgctgttcgtgctggccaccctagagaacatctttgtcctcagcgtcttctgcctgcacaagagcagctgcacggtggcagagatctacctggggaacctggccgcagcagacctgatcctggcctgcgggctgcccttctgggccatcaccatctccaacaacttcgactggctctttggggagacgctctgccgcgtggtgaatgccattatctccatgaacctgtacagcagcatctgtttcctgatgctggtgagcatcgaccgctacctggccctggtgaaaaccatgtccatgggccggatgcgcggcgtgcgctgggccaagctctacagcttggtgatctgggggtgtacgctgctcctgagctcacccatgctggtgttccggaccatgaaggagtacagcgatgagggccacaacgtcaccgcttgtgtcatcagctacccatccctcatctgggaagtgttcaccaacatgctcctgaatgtcgtgggcttcctgctgcccctgagtgtcatcaccttctgcacgatgcagatcatgcaggtgctgcggaacaacgagatgcagaagttcaaggagatccagacggagaggagggccacggtgctagtcctggttgtgctgctgctattcatcatctgctggctgcccttccagatcagcaccttcctggatacgctgcatcgcctcggcatcctctccagctgccaggacgagcgcatcatcgatgtaatcacacagatcgcctccttcatggcctacagcaacagctgcctcaacccactggtgtacgtgatcgtgggcaagcgcttccgaaagaagtcttgggaggtgtaccagggagtgtgccagaaagggggctgcaggtcagaacccattcagatggagaactccatgggcacactgcggacctccatctccgtggaacgccagattcacaaactgcaggactgggcagggagcagacagtgagcaaacgccagcagggctgctgtgaatttgtgtaaggattgagggacagttgcttttcagcatgggcccaggaatgccaaggagacatctatgcacgaccttgggaaatgagttgatgtctccggtaaaacaccggagactaattcctgccctgcccaattttgcagggagcatggctgtgaggatggggtgaactcacgcacagccaaggactccaaaatcacaacagcattactgttcttatttgctgccacacctgagccagcctgctccttcccaggagtggaggaggcctgggggcagggagaggagtgactgagcttccctcccgtgtgttctccgtccctgccccagcaagacaacttagatctccaggagaactgccatccagctttggtgcaatggctgagtgcacaagtgagttgttgccctgggtttctttaatctattcagctagaactttgaaggacaatttcttgcattaataaaggttaagccctgaggggtccctgataacaacctggagaccaggattttatggctcccctcactgatggacaaggaggtctgtgccaaagaagaatccaataagcacatattgagcacttgctgtatatgcagtattgagcactgtaggcaagagggaagaaagagaaggagccatctccatcttgaaggaactcaaagactcaagtgggaacgactgggcactgccaccaccagaaagctgttcgacgagacggtcgagcagggtgctgtgggtgatatggacagcagaagggggagaccaaggttccagctcaaccaataactattgcacaaccacctgtccctgcctcagttccctcttctgtaacatgaagtcgttgtgagggttaaaggcagtaacaggtataaagtacttagaaaagcaaagggtgctacgtacatgtgaggcatcattacgcagacgtaactgggatatgtttactataaggaaaagacactgaggtctagaaatagctccgtggagcagaatcagtattgggagccggtggcggtgtgaagcaccagtgtctggcacacagtaggtgctcattggctcccttccacctgtcattcccaccaccctgaggccccaaccgccacacacacaggagcatttggagagaaggccatgtcttcaaagtctgatttgtgatgaggcagaggaagatatttctaatcggtcttgcccagaggatcacagtgctgagaccccccaccaccagccggtacctgggaagggggagagtgcaggcctgctcagggactgttcctgtctcagcaaccaagggattgttcctgtcaatcaatggtttattggaaggtggcccagtatgagccctagaagagtgtgaaaaggaatggcaatggtgttcaccatcggcagtgccagggcagcactcattcacttgataaatgaatatttattagctggttggagagctagaacctggagaggctagaacctggagaactagaacctggagggctagaacctggagaggctagaaccaagaagggctagaacctggaggggctagaacctagagaagctaaaacctgagctagaagctggaggactagaacctggagggctggaatctggagagctagaacctggagggctagaacctggagggctagaatctggagagctagaacctggagggctagaatctggagagctagaacctggagggctagaacctggagagctagaacctagaagggctagaacctggagggctggaatctggagagctagaacctggagggctagaacctggagggctagaacctagaagggctagaacctggagggctggaatctggagagctagaacctggagggctagaacctggagggctagaacctagaagggctagaacctggagggctagaacctggcaggttagaacctagaagggctagaacctggagagccagaacctggagggctagaacctggaagggctagaacctgtagagctagaacatggagagctagaacccggcaggctagaacctggcaagctagaacctggagggaatgaacctggagggctagaacctggagaatgagaaaaatttacatggcaaagagcccataaatcctgaccaatccaactctgaattttaaagcaaaagcgtcaaaaaaaagattccctccttacccccaacccactcttttttcccaccacccactctcctctgcctcagtaagtatctggaggaagaaaacaggtgaaagaagaagtaaaaaccatttagtattagtattagaatgaagtcaaactgtgccacacatggtgaatgaaaaaaaaaaaaagaggctgtgttttgtcacacagggcagtcattcagcaccagagcacgtgatggtctgagactctcttaggagcagagctctgccgcaatggccatgtggggatccacacctggtctgaggggcaactgagtctgcgggagaagagcggccctatgcatggtgtagatgccctgataaagaacatctgtcctgtgaaagactcaatgagctgttatgttgtaaacaggaagcatttcacatccaaacgagaaaatcatgtaaacatgtgtcttttctgtagagcataataaatggatgaggtttttgcatagctctagcatttgttacaactcccgaaacccccgagtttggtccctggggtaccgccttgcacactcagaagcctttgggaaggggtgctattcatttctgctcaatctgttaacaggcttctggcatgtagatcagtggtctccaagcttttgtgattgtatattcctataggaaaaaaagaattgattatgcatacccagtatgtatacttattaatctgtatgaagatgtacattctaaaatataatcaaccagtagaaatttaagaaagaagatgtaaaaaa

SEQ ID NO: 366 - DNA, 1433 bp, Homo sapiens
cgcctttgcccgaagcccggggacgaaccgacggaccgaccgcctggcgcacggacgcgggcgctcgctttgtgttcggggctagcgtcggcgaggcttgagcttgcagcgcgcggcttccctgctttctcgcggccaccccggctccggcggcctcggcgcgcgaggggctggaggtgcgggagccgctctccgccggtcggtccccgcgcggctgagcccaggccgccagcgccgcggccccgtgcggtgtccctgagctcctgctccccgccgggctgctccgagcaacggtgcttcggagctccaaactcgggctgccggggcaagtgtcttcatgaacccagaggatgtccgggaagcactacaagggtcctgaagtcagttgttgcatcaaatacttcatatttggcttcaatgtcatattttggtttttgggaataacatttcttggaattggactgtgggcatggaatgaaaaaggagttctgtccaacatctcttccatcaccgatctcggcggctttgacccagtttggctcttccttgtggtgggaggagtgatgttcattttgggatttgcagggtgcattggagcgctacgggaaaacactttccttctcaagtttttttctgtgttcctgggaattattttcttcctggagctcactgccggagttctagcatttgttttcaaagactggatcaaagaccagctgtatttctttataaacaacaacatcagagcatatcgggatgacattgatttgcaaaacctcatagacttcacccaggaatattggcagtgctgtggggcttttggagctgatgattggaacctaaatatttacttcaattgcacagattccaatgcaagtcgagagcgatgtggcgttccattctcctgctgcactaaagatcccgcagaagatgtcatcaacactcagtgtggctatgatgccaggcaaaaaccagaagttgaccagcagattgtaatctacacgaaaggctgtgtgccccagtttgagaagtggttgcaggacaatttaaccatcgttgctggtattttcataggcattgcattgctgcagatatttgggatatgcctggcccagaatttggttagcgatatcgaagctgtcagggcgagctggtagaccccctgcaaccgctgctgcaagacactggacagacccagctttcgggaccctcccgcgtgccgaactgatcttcgagctgcatggacctaatcacagatgcagcctgcagtctcgcctaatggagctgccattaggggagtgtaaaactgggaaatgctgctcactgacagaattaaaaaaaaaaataaccagtatgaaagtcgttgcgccgtgaatctctactgtagccatgaatttatggacagttagatgcttaccaaaaaagaaaaaaaa

SEQ ID NO: 367 - DNA, 1417 bp, Homo sapiens
ggtgaacagtgaacatatttacatttgatttaacagtgaaccttaattctttctggcttcacagtgaaacaagtttatgcaatcgatcaaatattttcatccctgaggttaacaattaccatcaaaatgttttgtggagactatgtgcaaggaaccatcttcccagctcccaatttcaatcccataatggatgcccaaatgctaggaggagcactccaaggatttgactgtgacaaagacatgctgatcaacattctgactcagcgctgcaatgcacaaaggatgatgattgcagaggcataccagagcatgtatggccgggacctgattggggatctgagggagcagctttcggatcacttcaaagatgtgatggctggcctcatgtacccaccaccactgtatgatgctcatgagctctggcatgccatgaagggagtaggcactgatgagaattgcctcattgaaatactagcttcaagaacaaatggagaaattttccagatgcgagaagcctactgcttgcaatacagcaataacctccaagaggacatttattcagagacctcgggacacttcagagatactctcatgaacttggtccaggggaccagagaggaaggatattcagaccctgcgatggctgctcaggatgcaatggtcctatgggaagcctgtcagcagaagacggggggacacaaaaccatgctgcaaatgatcctctgcaacaagagctaccagcagctgcggctggttttccaggaatttcaaaatatttctgggcaggatatggtagatgccattaatgaatgttatgatggatactttcaggagctgctggttgcaattgttctctgtgttcgagacaaaccagcctattttgcttatagattatatagtgcaattcatgactttggtttccataataaaactgtaatcaggattctcattgccagaagtgaaatagacctgctgaccataaggaaacgatacaaagagcgatatggaaaatccctatttcatgatatcagaaattttgcttcagggcattataagaaagcactgcttgccatctgtgctggtgatgctgaggactactaaaatgaagaggacttggagtactgtgcactcctctttctagacacttccaaatagagattttctcacaaatttgtactgttcatggcactattaacaaaactatacaatcatattttctcttctatctttgaaattattctaagccaaagaaaactatgaatgaaagtatatgatactgaatttgcctactatcctgaatttgcctactatctaatcagcaattaaataaattgtgcatgatggaataataggaaaaattggcattgggaataggattttattttaaatgtggaaccatccaacaacctaccaacca

SEQ ID NO: 368 - DNA, 336 bp, Homo sapiens
agactcagctcctggtgaagctcccagccatcagccatgagggtcttgtatctcctcttctcgttcctcttcatattcctgatgcctcttccaggtgtttttggtggtataggcgatcctgttacctgccttaagagtggagccatatgtcatccagtcttttgccctagaaggtataaacaaattggcacctgtggtctccctggaacaaaatgctgcaaaaagccatgaggaggccaagaagctgctgtggctgatgcggattcagaaagggctccctcatcagagacgtgcgacatgtaaaccaaattaaactatggtgtccaaagatacgca

SEQ ID NO: 369 - DNA, 1500 bp, Homo sapiens
cggagggtggggagcggaaagcaggacgcacggctcccgcggcccgctggctgcccttcccgccagcgcaggtgtgggacgggcggcggactaggcacagagctgcgggagcaggcacagggagtgtggagcctggcggcgggacggcgggatccggtgggagccggagtcccgccgaggggggctggaggtggaggggcccggcgaggccgcgatgaagccgagcggcgaggaccaggcggcgctggcggccggcccctgggaggagtgcttccaggcggccgtgcagctggcgctgcgggcaggacagatcatcagaaaagcccttactgaggaaaaacgtgtctcaacaaaaacatcagctgcagatcttgtgacagaaacagatcaccttgtggaagatttaattatttctgagttgcgagagaggtttccttcacacaggttcattgcagaagaggccgcggcttctggggccaagtgtgtgctcacccacagcccgacgtggatcatcgaccccatcgacggcacctgcaattttgtgcacagattcccgactgtggcggttagcattggatttgctgttcgacaagagcttgaattcggagtgatttaccactgcacagaggagcggctgtacacgggccggcggggtcggggcgccttctgcaatggccagcggctccgggtctccggggagacagatctctcaaaggccttggttctgacagaaattggccccaaacgtgaccctgcgaccctgaagctgttcctgagtaacatggagcggctgctgcatgccaaggcgcatggggtccgagtgattggaagctccacattggcactctgccacctggcctcaggggccgcggatgcctattaccagtttggcctgcactgctgggatctggcggctgccacagtcatcatcagagaagcaggcggcatcgtgatagacacttcgggtggacccctcgacctcatggcttgcagagtggttgcggccagcacccgggagatggcgatgctcatagctcaggccttacagacgattaactatgggcgggatgatgagaagtgactgcggctgaggcaaagctgctcccaaggcctccctgggctgctgtgggctcctggggaggtggccctcgtggcccacgctccatgccagtggctcacgctctgctcctggctaccccagagggagttgtcacgctacagtgagtggctggccttttaaatcgacgtctctctcaccaggatttggtgtttagctgtttctctctttaatctcacgtagcctttttcaggttagtacgtgttcttctgtcagggccaaaactcaaatctcctgtgaaatacgtattgataatccaatcttgatttttccccccagaatataaatctcaggtaataaggctttagaactgctgataaagcggatcgttctcaggccctccccccggagtacttcagaatgcaataaatcaaaataatggc

SEQ ID NO: 370 - DNA, 1204 bp, Homo sapiens
ctctgaggagaagcagcagcaaacatttgctagtcagacaagtgacagggaatggattccaaacagcagtgtgtaaagctaaatgatggccacttcatgcctgtattgggatttggcacctatgcacctccagaggttccgagaagtaaagctttggaggtcacaaaattagcaatagaagctgggttccgccatatagattctgctcatttatacaataatgaggagcaggttggactggccatccgaagcaagattgcagatggcagtgtgaagagagaagacatattctacacttcaaagctttggtccacttttcatcgaccagagttggtccgaccagccttggaaaactcactgaaaaaagctcaattggactatgttgacctctatcttattcattctccaatgtctctaaagccaggtgaggaactttcaccaacagatgaaaatggaaaagtaatatttgacatagtggatctctgtaccacctgggaggccatggagaagtgtaaggatgcaggattggccaagtccattggggtgtcaaacttcaaccgcaggcagctggagatgatcctcaacaagccaggactcaagtacaagcctgtctgcaaccaggtagaatgtcatccgtatttcaaccggagtaaattgctagatttctgcaagtcgaaagatattgttctggttgcctatagtgctctgggatctcaacgagacaaacgatgggtggacccgaactccccggtgctcttggaggacccagtcctttgtgccttggcaaaaaagcacaagcgaaccccagccctgattgccctgcgctaccagctgcagcgtggggttgtggtcctggccaagagctacaatgagcagcgcatcagacagaacgtgcaggtttttgagttccagttgactgcagaggacatgaaagccatagatggcctagacagaaatctccactattttaacagtgatagttttgctagccaccctaattatccatattcagatgaatattaacatggagagctttgcctgatgtctaccagaagccctgtgtgtggatggtgacgcagaggacgtctctatgccggtgactggacatatcacctctacttaaatccgtcctgtttagcgacttcagtcaactacagctgagtccataggccagaaagacaataaatttttatcattttgaaat

SEQ ID NO: 371 - DNA, 1560 bp, Homo sapiens
ggcacgaggcctgagctcaggagtttgagaccagcctgtctctactaacaatataaaaattagctgggagtcacggtgggcgcctgtaatcccagctactcgggaggctgaggcaggagaattgcttgaacccaggagacagaggttgtagtgagctgagatcgcaccactgcactctagccttggcaacagtgcaagactgtctcaaaaacagcaacagagagcaggacgtgagacttctacctgctcactcagaatcatttctgcaccaaccatggccacgtttgtggagctcagtaccaaagccaagatgcccattgtgggcctgggcacttggaagtctcctcttggcaaagtgaaagaagcagtgaaggtggccattgatgcaggatatcggcacattgactgtgcctatgtctatcagaatgaacatgaagtgggggaagccatccaagagaagatccaagagaaggctgtgaagcgggaggacctgttcatcgtcagcaagttgtggcccactttctttgagagaccccttgtgaggaaagcctttgagaagaccctcaaggacctgaagctgagctatctggacgtctatcttattcactggccacagggattcaagtctggggatgaccttttccccaaagatgataaaggtaatgccatcggtggaaaagcaacgttcttggatgcctgggaggccatggaggagctggtggatgaggggctggtgaaagcccttggggtctccaatttcagccacttccagatcgagaagctcttgaacaaacctggactgaaatataaaccagtgactaaccaggttgagtgtcacccatacctcacacaggagaaactgatccagtactgccactccaagggcatcaccgttacggcctacagccccctgggctctccggatagaccttgggccaagccagaagacccttccctgctggaggatcccaagattaaggagattgctgcaaagcacaaaaaaaccgcagcccaggttctgatccgtttccatatccagaggaatgtgattgtcatccccaagtctgtgacaccagcacgcattgttgagaacattcaggtctttgactttaaattgagtgatgaggagatggcaaccatactcagcttcaacagaaactggagggcctgtaacgtgttgcaatcctctcatttggaagactatcccttcgatgcagaatattgaggttgaatctcctggtgagattatacaggagattctctttcttcgctgaagtgtgactacctccactcatgtcccattttagccaagcttatttaagatcacagtgaacttagtcctgttatagacgagaatcgaggtgctgttttagacatttatttctgtatgttcaactaggatcagaatatcacagaaaagcatggcttgaataaggaaatgacaattttttccacttatctgatcagaacaaatgtttattaagcatcagaaactctgccaacactgaggatgtaaagatcaataaaaaaaataataatcataaaaaaaaaaaaaaaaaa

SEQ ID NO: 372 - DNA, 662 bp, Homo sapiens
accgccgacgcagacccctctctgcacgccagcccgcccgcacccaccatggccacagttcagcagctggaaggaagatggcgcctggtggacagcaaaggctttgatgaatacatgaaggagctaggagtgggaatagctttgcgaaaaatgggcgcaatggccaagccagattgtatcatcacttgtgatggtaaaaacctcaccataaaaactgagagcactttgaaaacaacacagttttcttgtaccctgggagagaagtttgaagaaaccacagctgatggcagaaaaactcagactgtctgcaactttacagatggtgcattggttcagcatcaggagtgggatgggaaggaaagcacaataacaagaaaattgaaagatgggaaattagtggtggagtgtgtcatgaacaatgtcacctgtactcggatctatgaaaaagtagaataaaaattccatcatcactttggacaggagttaattaagagaatgaccaagctcagttcaatgagcaaatctccatactgtttctttcttttttttttcattactgtgttcaattatctttatcataaacattttacatgcagctatttcaaagtgtgttggattaattaggatcatccctttggttaataaataaatgtgtttgtgct

SEQ ID NO: 373 - DNA, 1501 bp, Homo sapiens
agcgagtccttcttttcctgactgcagctcttttcattttgccatccttctccagctccatgatggttctgcaggtttctgcggccccccggacagtggctctgacggcgttactgatggtgctgctcacatctgtggtccagggcagggccactccagagaattacgtgtaccagggacggcaggaatgctacgcgtttaatgggacacagcgcttcctggagagatacatctacaaccgggaggagtacgcgcgcttcgacagcgacgtgggggagttccgggcggtgacggagctggggcggcctgctgcggagtactggaacagccagaaggacatcctggaggagaagcgggcagtgccggacagggtatgcagacacaactacgagctggacgaggccgtgaccctgcagcgccgagtccagcctaaggtgaacgtttccccctccaagaaggggcccctgcagcaccacaacctgcttgtctgccacgtgacagatttctacccaggcagcattcaagtccgatggttcctgaatggacaggaggaaacagctggggtcgtgtccaccaacctgatccgtaatggagactggaccttccagatcctggtgatgctggaaatgaccccccagcagggagacgtctacatctgccaagtggagcacaccagcctggacagtcctgtcaccgtggagtggaaggcacagtctgattctgcccagagtaagacattgacgggagctgggggcttcgtgctggggctcatcatctgtggagtgggcatcttcatgcacaggaggagcaagaaagttcaacgaggatctgcataaacagggttcctgacctcaccgaaaagactaatgtgccttagaacaagcatttgctgtgttttgttaacacctggttccaggacagaccctcagcttcccaagaggatactgctgccaagaagttgctctgaagtcagtttctatcgttctgctctttgattcaaagcactgtttctctcactgggcctccaaccatgttcccttcttcttagcaccacaaataatcaaaacccaacataagtgtttgctttcctttaaaaatatgcatcaaatcgtctctcattacttttctctgagggttttagtaaacagtaggagttaataaagaagttcattttggtttacacgtaggaaagaagagaagcatcaaagtggagatatgttaactattgtataatgtggcctgttatacatgacactcttctgaattgactgtatttcagtgagctgcccccaaatcaagtttagtgccctcatccatttatgtctcagaccgctattcttaactattcaatggtgagcagactgcaaatctgcctgataggacccatattcccacagcactaattcaacatatatcttactgagagcatgttttatcattaccattaagaagttaaatgaacatcagaatttaaaatcataaatataatctaatacacttt

SEQ ID NO: 374 - DNA, 1743 bp, Homo sapiens
aaagaaggtaagggcagtgagaatgatgcatcttgcattccttgtgctgttgtgtctgccagtctgctctgcctatcctctgagtggggcagcaaaagaggaggactccaacaaggatcttgcccagcaatacctagaaaagtactacaacctcgaaaaggatgtgaaacagtttagaagaaaggacagtaatctcattgttaaaaaaatccaaggaatgcagaagttccttgggttggaggtgacagggaagctagacactgacactctggaggtgatgcgcaagcccaggtgtggagttcctgacgttggtcacttcagctcctttcctggcatgccgaagtggaggaaaacccaccttacatacaggattgtgaattatacaccagatttgccaagagatgctgttgattctgccattgagaaagctctgaaagtctgggaagaggtgactccactcacattctccaggctgtatgaaggagaggctgatataatgatctctttcgcagttaaagaacatggagacttttactcttttgatggcccaggacacagtttggctcatgcctacccacctggacctgggctttatggagatattcactttgatgatgatgaaaaatggacagaagatgcatcaggcaccaatttattcctcgttgctgctcatgaacttggccactccctggggctctttcactcagccaacactgaagctttgatgtacccactctacaactcattcacagagctcgcccagttccgcctttcgcaagatgatgtgaatggcattcagtctctctacggacctccccctgcctctactgaggaacccctggtgcccacaaaatctgttccttcgggatctgagatgccagccaagtgtgatcctgctttgtccttcgatgccatcagcactctgaggggagaatatctgttctttaaagacagatatttttggcgaagatcccactggaaccctgaacctgaatttcatttgatttctgcattttggccctctcttccatcatatttggatgctgcatatgaagttaacagcagggacaccgtttttatttttaaaggaaatgagttctgggccatcagaggaaatgaggtacaagcaggttatccaagaggcatccataccctgggttttcctccaaccataaggaaaattgatgcagctgtttctgacaaggaaaagaagaaaacatacttctttgcagcggacaaatactggagatttgatgaaaatagccagtccatggagcaaggcttccctagactaatagctgatgactttccaggagttgagcctaaggttgatgctgtattacaggcatttggatttttctacttcttcagtggatcatcacagtttgagtttgaccccaatgccaggatggtgacacacatattaaagagtaacagctggttacattgctaggcgagatagggggaagacagatatgggtgtttttaataaatctaataattattcatctaatgtattatgagccaaaatggttaatttttcctgcatgttctgtgactgaagaagatgagccttgcagatatctgcatgtgtcatgaagaatgtttctggaattcttcacttgcttttgaattgcactgaacagaattaagaaatactcatgtgcaataggtgagagaatgtattttcatagatgtgttattacttcctcaataaaaagttttattttgggcctgttcctt

SEQ ID NO: 375 - DNA, 2334 bp, Homo sapiens
agacacctctgccctcaccatgagcctctggcagcccctggtcctggtgctcctggtgctgggctgctgctttgctgcccccagacagcgccagtccacccttgtgctcttccctggagacctgagaaccaatctcaccgacaggcagctggcagaggaatacctgtaccgctatggttacactcgggtggcagagatgcgtggagagtcgaaatctctggggcctgcgctgctgcttctccagaagcaactgtccctgcccgagaccggtgagctggatagcgccacgctgaaggccatgcgaaccccacggtgcggggtcccagacctgggcagattccaaacctttgagggcgacctcaagtggcaccaccacaacatcacctattggatccaaaactactcggaagacttgccgcgggcggtgattgacgacgcctttgcccgcgccttcgcactgtggagcgcggtgacgccgctcaccttcactcgcgtgtacagccgggacgcagacatcgtcatccagtttggtgtcgcggagcacggagacgggtatcccttcgacgggaaggacgggctcctggcacacgcctttcctcctggccccggcattcagggagacgcccatttcgacgatgacgagttgtggtccctgggcaagggcgtcgtggttccaactcggtttggaaacgcagatggcgcggcctgccacttccccttcatcttcgagggccgctcctactctgcctgcaccaccgacggtcgctccgacggcttgccctggtgcagtaccacggccaactacgacaccgacgaccggtttggcttctgccccagcgagagactctacacccgggacggcaatgctgatgggaaaccctgccagtttccattcatcttccaaggccaatcctactccgcctgcaccacggacggtcgctccgacggctaccgctggtgcgccaccaccgccaactacgaccgggacaagctcttcggcttctgcccgacccgagctgactcgacggtgatggggggcaactcggcgggggagctgtgcgtcttccccttcactttcctgggtaaggagtactcgacctgtaccagcgagggccgcggagatgggcgcctctggtgcgctaccacctcgaactttgacagcgacaagaagtggggcttctgcccggaccaaggatacagtttgttcctcgtggcggcgcatgagttcggccacgcgctgggcttagatcattcctcagtgccggaggcgctcatgtaccctatgtaccgcttcactgaggggccccccttgcataaggacgacgtgaatggcatccggcacctctatggtcctcgccctgaacctgagccacggcctccaaccaccaccacaccgcagcccacggctcccccgacggtctgccccaccggaccccccactgtccacccctcagagcgccccacagctggccccacaggtcccccctcagctggccccacaggtccccccactgctggcccttctacggccactactgtgcctttgagtccggtggacgatgcctgcaacgtgaacatcttcgacgccatcgcggagattgggaaccagctgtatttgttcaaggatgggaagtactggcgattctctgagggcagggggagccggccgcagggccccttccttatcgccgacaagtggcccgcgctgccccgcaagctggactcggtctttgaggagccgctctccaagaagcttttcttcttctctgggcgccaggtgtgggtgtacacaggcgcgtcggtgctgggcccgaggcgtctggacaagctgggcctgggagccgacgtggcccaggtgaccggggccctccggagtggcagggggaagatgctgctgttcagcgggcggcgcctctggaggttcgacgtgaaggcgcagatggtggatccccggagcgccagcgaggtggaccggatgttccccggggtgcctttggacacgcacgacgtcttccagtaccgagagaaagcctatttctgccaggaccgcttctactggcgcgtgagttcccggagtgagttgaaccaggtggaccaagtgggctacgtgacctatgacatcctgcagtgccctgaggactagggctcccgtcctgctttgcagtgccatgtaaatccccactgggaccaaccctggggaaggagccagtttgccggatacaaactggtattctgttctggaggaaagggaggagtggaggtgggctgggccctctcttctcacctttgttttttgttggagtgtttctaataaacttggattctctaaccttt

SEQ ID NO: 376 - DNA, 2084 bp, Homo sapiens
aaccgcatctgcagcgagcaactgagaagccaagactgagccggcggccgcggcgcagcgaacgagcagtgaccgtgctcctacccagctctgcttcacagcgcccacctgtctccgcccctcggcccctcgcccggctttgcctaaccgccacgatgatgttctcgggcttcaacgcagactacgaggcgtcatcctcccgctgcagcagcgcgtccccggccggggatagcctctcttactaccactcacccgcagactccttctccagcatgggctcgcctgtcaacgcgcaggacttctgcacggacctggccgtctccagtgccaacttcattcccacggtcactgccatctcgaccagtccggacctgcagtggctggtgcagcccgccctcgtctcctctgtggccccatcgcagaccagagcccctcaccctttcggagtccccgccccctccgctggggcttactccagggctggcgttgtgaagaccatgacaggaggccgagcgcagagcattggcaggaggggcaaggtggaacagttatctccagaagaagaagagaaaaggagaatccgaagggaaaggaataagatggctgcagccaaatgccgcaaccggaggagggagctgactgatacactccaagcggagacagaccaactagaagatgagaagtctgctttgcagaccgagattgccaacctgctgaaggagaaggaaaaactagagttcatcctggcagctcaccgacctgcctgcaagatccctgatgacctgggcttcccagaagagatgtctgtggcttcccttgatctgactgggggcctgccagaggttgccaccccggagtctgaggaggccttcaccctgcctctcctcaatgaccctgagcccaagccctcagtggaacctgtcaagagcatcagcagcatggagctgaagaccgagccctttgatgacttcctgttcccagcatcatccaggcccagtggctctgagacagcccgctccgtgccagacatggacctatctgggtccttctatgcagcagactgggagcctctgcacagtggctccctggggatggggcccatggccacagagctggagcccctgtgcactccggtggtcacctgtactcccagctgcactgcttacacgtcttccttcgtcttcacctaccccgaggctgactccttccccagctgtgcagctgcccaccgcaagggcagcagcagcaatgagccttcctctgactcgctcagctcacccacgctgctggccctgtgagggggcagggaaggggaggcagccggcacccacaagtgccactgcccgagctggtgcattacagagaggagaaacacatcttccctagagggttcctgtagacctagggaggaccttatctgtgcgtgaaacacaccaggctgtgggcctcaaggacttgaaagcatccatgtgtggactcaagtccttacctcttccggagatgtagcaaaacgcatggagtgtgtattgttcccagtgacacttcagagagctggtagttagtagcatgttgagccaggcctgggtctgtgtctcttttctctttctccttagtcttctcatagcattaactaatctattgggttcattattggaattaacctggtgctggatattttcaaattgtatctagtgcagctgattttaacaataactactgtgttcctggcaatagtgtgttctgattagaaatgaccaatattatactaagaaaagatacgactttattttctggtagatagaaataaatagctatatccatgtactgtagtttttcttcaacatcaatgttcattgtaatgttactgatcatgcattgttgaggtggtctgaatgttctgacattaacagttttccatgaaaacgttttattgtgtttttaatttatttattaagatggattctcagatatttatatttttattttatttttttctaccttgaggtcttttgacatgtggaaagtgaatttgaatgaaaaatttaagcattgtttgcttattgttccaagacattgtcaataaa

SEQ ID NO: 377 - DNA, 3020 bp, Homo sapiens
tgaagctcgtcagttcaccatccgccctcggcttccgcggggcgctgggccgccagcctcggcaccgtcctttcctttctccctcgcgttaggcaggtgacagcagggacatgtctcgggagatgcaggatgtagacctcgctgaggtgaagcctttggtggagaaaggggagaccatcaccggcctcctgcaagagtttgatgtccaggagcaggacatcgagactttacatggctctgttcacgtcacgctgtgtgggactcccaagggaaaccggcctgtcatcctcacctaccatgacatcggcatgaaccacaaaacctgctacaaccccctcttcaactacgaggacatgcaggagatcacccagcactttgccgtctgccacgtggacgcccctggccagcaggacggcgcagcctccttccccgcagggtacatgtacccctccatggatcagctggctgaaatgcttcctggagtccttcaacagtttgggctgaaaagcattattggcatgggaacaggagcaggcgcctacaccctaactcgatttgctctaaacaaccctgagatggtggagggccttgtccttatcaacgtgaacccttgtgcggaaggctggatggactgggccgcctccaagatctcaggatggacccaagctctgccggacatggtggtgtcccacctttttgggaaggaagaaatgcagagtaacgtggaagtggtccacacctaccgccagcacattgtgaatgacatgaaccccggcaacctgcacctgttcatcaatgcctacaacagccggcgcgacctggagattgagcgaccaatgccgggaacccacacagtcaccctgcagtgccctgctctgttggtggttggggacagctcgcctgcagtggatgccgtggtggagtgcaactcaaaattggacccaacaaagaccactctcctcaagatggcggactgtggcggcctcccgcagatctcccagccggccaagctcgctgaggccttcaagtacttcgtgcagggcatgggatacatgccctcggctagcatgacccgcctgatgcggtcccgcacagcctctggttccagcgtcacttctctggatggcacccgcagccgctcccacaccagcgagggcacccgaagccgctcccacaccagcgagggcacccgcagccgctcgcacaccagcgagggggcccacctggacatcacccccaactcgggtgctgctgggaacagcgccgggcccaagtccatggaggtctcctgctaggcggcctgcccagctgccgcccccggactctgatctctgtagtggccccctcctccccggccccttttcgccccctgcctgccatactgcgcctaactcggtattaatccaaagcttattttgtaagagtgagctctggtggagacaaatgaggtctattacgtgggtgccctctccaaaggcggggtggcggtggaccaaaggaaggaagcaagcatctccgcatcgcatcctcttccattaaccagtggccggttgccactctcctcccctccctcagagacaccaaactgccaaaaacaagacgcgtagcagcacacacttcacaaagccaagcctaggccgccctgagcatcctggttcaaacgggtgcctggtcagaaggccagccgcccacttcccgtttcctctttaactgaggagaagctgatccagctttccggaaacaaaatccttttcttcatttggggaggggggtaatagtgacatgcaggcacctcttttaaacaggcaaaacaggaagggggaaaaggtgggattcatgtcgaggctagaggcatttggaacaacaaatctacgtagttaacttgaagaaaccgatttttaaagttggtgcatctagaaagctttgaatgcagaagcaaacaagcttgatttttctagcatcctcttaatgtgcagcaaaagcaggcaacaaaatctcctggctttacagacaaaaatatttcagcaaacgttgggcatcatggtttttgaaggctttagttctgctttctgcctctcctccacagccccaacctcccacccctgatacatgagccagtgattattcttgttcagggagaagatcatttagatttgttttgcattccttagaatggagggcaacattccacagctgccctggctgtgatgagtgtccttgcaggggccggagtaggagcactggggtgggggcggaattggggttactcgatgtaagggattccttgttgttgtgttgagatccagtgcagttgtgatttctgtggatcccagcttggtccaggaattttgagagattggcttaaatccagttttcaatcttcgacagctgggctggaacgtgaactcagtagctgaacctgtctgacccggtcacgttcttggatcctcagaactctttgctcttgtcggggtgggggtgggaactcacgtggggagcggtggctgagaaaatgtaaggattctggaatacatattccatggactttccttccctctcctgcttcctcttttcctgctccctaacctttcgccgaatggggcagacaaacactgacgtttctgggtggccagtgcggctgccaggttcctgtactactgccttgtacttttcattttggctcaccgtggattttctcataggaagtttggtcagagtgaattgaatattgtaagtcagccactgggacccgaggatttctgggaccccgcagttgggaggaggaagtagtccagccttccaggtgggcgtgagaggcaatgactcgttacctgccgcccatcaccttggaggccttccctggccttgagtagaaaagtcggggatcggggcaagagaggctgagtacggatgggaaactattgtgcacaagtctttccagaggagtttcttaatgagatatttgtatttatttccagaccaataaatttgtaactttgcaaaaaaaaaaaaaaaaaaaa

SEQ ID NO: 378 - DNA, 7568 bp, Homo sapiens
gcgcggaggcagggaaccggagccttggagcgacccaacccctcgtctcgctgccctcccgcgcctgcaacggtgcgcggagactccggcgaactcagacacccaacggcggagaacagaagcggcaggcggcggacgtggcccggaagctgcgcgccgaacgcagcgcacccgctgccgagcagaggagccgcgcctttccccgaccctcggctccagcccccggcgcctgccgcctcgcagcccctctgcgtcctcggctcgggggccggcaccggcgatgccgagcggacgctccagtcctccgacccgctgaagaagcagcagccgctcgcccggagcctacggggattgtgcgagcggatcgtgctcggtggaggctcgggctgcggggcgcggggactccggggggcggggggagggaccgctctgtcggtgcccggcgccagccgcggctttgaagggtctccctcccctgcccttagcagctctgccacggactccgggaggctgcgggcggcgtcctgagggctccccagcagacccaatcggacttgagaaggtgatcgctctgctctcccaacccccttccctccccattccccccacttaactttttgtctccgttcatccgcggcttcgtcccctccccggcagacccacccgcggctgtgacaaccgcccggggcatgggccccccaacacggctcctagaggccccgcggcctcgcaagatgtgagaggccctccccgggcagaatcggagcttcaggagaggagctaataccccgccccccgtccctcacatcaggcggggtggaggtgcgcgctgagcccccgcggtgctgagcgtcccggagcgcccaatcctgggctggaacgagtagctggccggaggcgcgccgcggagagccggctgtcatgccctattgatccccctctgccccccgccaagtatgtttgggctggaccaattcgagccccaggtcaacagcaggaacgctggccagggcgagaggaactttaacgagaccggactgagcatgaacacccactttaaggccccggctttccacactggggggccccctggccctgtggatcctgctatgagcgcgctggggcaacccccgatcttgggcatgaacatggagccctacggcttccacgcgcgcggccactcggagttgcacgcaggggggctgcaagcgcagcctgtgcacggcttctttggcggccagcagcctcaccacggccacccgggaagtcatcatccccaccagcatcacccccactttgggggcaacttcggtggcccggaccccggggcctcgtgcctgcacgggggtcgcctgctcggctacggcggcgcagccggaggcctgggcagccagccgcccttcgccgagggctatgagcacatggcggagagccaggggcctgagagcttcggcccgcagcgaccggggaacctcccggacttccacagttcaggtgcctccagccaccgcgtgccggccccatgcctgccgctggaccagagccctaaccgagccgcctccttccacggcctgccgtcctccagcggctccgattcccacagtctggagccacggagggtgacgaaccaaggagccgtcgactcgctggaatacaattaccgggcgaggcgccctcgggacattttgacatgttttcgccctctgactccgaagggcagctgcctcattatgcagcgggtcgccaggttcctggggggcggctttcccggggcgccctcggccatgcccagagctgcgggcatggtgggcttgtccaaaatgcacgcccagccaccgcagcagcagccccagcagcagcagcagccccagcagcagcagcagcatggtgtgttctttgagaggttcagtggggccagaaagatgcctgtgggtctggagccctcagtgggctccaggcacccgttaatgcagcctccccagcaggccccgccaccccctcagcagcagcccccgcagcagccgccacagcagcagccgccgccgccacccgggcttctagtccgacaaaattcgttgcccgcctgcgctccctcggccccagcagggcgaggcgggcacgcccagcggcggcctgcaggacggaggccccatgctgcccagccagcacgcgcaattcgagtatcccatccaccggctggagaaccggagcatgcacccttattccgagcctgttttcagcatgcagcatcctcctccgcagcaggcgcccaaccagcggctgcagcatttcgacgcgcccccctacatgaacgtggccaagaggcgcgcttcgactttccgggcagcgcgggagtggaccgctgcgcttcgtggaacggcagcatgcacaacggcgctctggataatcacctctccccttccgcctacccaggcctacccggcgagttcacaccgcctgtgcccgacagcttcccttcggggccgcccctgcagcatccggccccggaccaccagtccctgcaacagcagcagcagcagcagcagcagcagcaacagcagcagcagcagcagcaacagcaacagcaacagcagcagcagcagcagcgccaaaacgcggccctcatgattaagcagatggcgtcgcggaatcagcagcagcggctgcgccagcccaacctggctcagctaggccaccccggggacgtgggccagggcggcctggtgcatggcggcccggtgggcggcttggcccagccgaactttgagcgcgaaggcggcagcacgggcgccgggcgtctgggcaccttcgagcagcaggcgccgcacttggcgcaagagagcgcgtggttctcaggtccgcatccgccgcccggagacctgctgccccgtaggatgggcggctcgggtctgcccgctgactgtggcccgcacgaccccagcctggcgccccctcctccgcctggtggctcgggggtgctgttccggggccctctgcaggagccgatgaggatgcccggagaggccacgtgccgcgctgccttcaccggcctgcagttcgggggcagtctgggaggcctgggtcagctgcagtcgcccggggcgggcgtggggctccccagcgctgcttcggagcgccggcccccgccgccggactttgctacgtctgcgctcgggggccagccgggctttccgtttggtgcagccggccggcagtccacgccgcacagcggtccaggcgtgaactcgccccccagcgcgggagggggcggtggcagctctggtggcggcggtggcgggggtgcctacccgccgcagcctgatttccagcccagccagcgcacctcggccagtaaattgggcgcgctctcgctgggctccttcaacaagcccagctccaaggacaacctgttcggccagagctgcctggctgcgctctccaccgcttgccagaacatgatcgccagcctcggggcccccaacctcaacgtgaccttcaacaagaagaacccgccagagggcaagaggaaactgagccagaacgagaccgacggcgcggcagtggccggcaacccgggctcggattacttcccaggagggactgctcctgggggccccaggacccggaggccgtccgggaccagtagcagcggctccaaagcctcggggccgcccaaccctccagcccagggggacggcaccagcctctcccccaactacaccctggaatccacgtcggggaatgacggcaagccggtctccgggggcggcggccggggacggggtcgcagaaaaagggacagtggtcacgtgagccctggcaccttctttgacaagtactcggcggctccggacagcgggggcgcacctggggtgagcccagggcagcagcaagcgtcaggcgcagccgtcgggggaagctccgcaggcgagacgcgcggggcaccgacgccccacgaaaaggcgctcacgtcgccatcctgggggaagggggctgagttgctcctgggggatcagccggacctcattgggtccctggacggcggggccaagtcggacagtagttcgccaaacgtgggtgagttcgcctcggacgaggtgagcacgagctacgccaatgaggacgaggtgtcgtccagctctgacaacccccaggcactagttaaagcgagcaggagtcccctggtgaccggctcgcccaaactccctccccgtggggtaggcgccggggaacacggaccgaaggcgcccccgcccgccctcggcctgggcatcatgtctaactctacctcgacccctgacagctacggcggcggtgggggcccgggccatccgggcactccgggcctggagcaggtccgcaccccgacgagcagcagcggcgccccgccacccgacgagatccaccccctggagatccttcaggcgcagatccagctacagaggcagcagttcagcatctccgaggaccagcctctggggctgaagggtggcaagaagggtgagtgcgccgtcggggcctcaggggcgcagaatggcgacagcgagctgggcagctgctgctccgaggcggtcaagagcgccatgagcaccattgacctggactcgctgatggcagagcacagcgctgcctggtacatgcccgctgacaaggccctggtggacagcgcggacgacgacaagacgttggcgccctgggagaaggccaaaccccagaaccccaacagcaaagaagcccacgacctccctgcaaacaaggcctcagcatcccagcctggcagccacttgcagtgcctgtctgtccactgcacagacgacgtgggtgacgccaaggctcgagcctccgtgcccacctggcggtccctgcattctgacatctccaacagatttgggacattcgtggctgccctaacttgaatgacaagaaagatcccctcctctaccaggcccttcctctccccctgtctgtttccttccccctcaaccttaccccacccctctgttaatttgaaagggccactattgctgagtggatgagttttttttttttcctctaggttggtacctgcttagtggcatatggaccggaaagggttaatttaaagggggggaacctcaaaagtttttttaaaaaagaaacttgtctgccacagtatgttaccagtgttaacccttctgcagttagcaaacttttgcttaagcctttttcctctagatactccccatgtttcggtaatcttggcatacattttttagatgacctctttccttgttttgttttcatgctgctgtatgtccaagtattgttatttcataataagacaagagttgctttcttttttattctttttccttttcttaccccctccccttttattttctttttgctttgttcactgcttattaaaatggaaatcctggagaatagtagttctggaatattgccgggtgaaagtccaattgtcatcacaatgttatatattgacaccccagtgtcatcagtcaggcaggagccaaacaatgaatgcccctcttaggtattccgcctgggattttgttttgtctgttccctaagaaaatatattttcattcctgcaaacacagtgctcagccttcagttcccttccacttgagttctctcttctcctgctggaagccgcccctctctgcgatggacgtgaggacgtgtccagctctgctctgtgggaaggagttggaatgttcgacagcagtgttttctctccttttctgggcctcctcgcaaatgcccaggccctgcattttcacgctgtgctaagcagcctttggtctgcatgggggatggtgtgctcccagcctgcagtctttggagcaaggctgctgcccgtgccttgggtgctggagttggaggaggctgttctcagccctttcccttttctgaaagctgttcctggccgggcatcccagggaagaaggaggggactgcgtgtatctcctccacctctcccattccatccccagtccagcctgggcaaccccacccctgggagggatgaggcaccctcttgctcagcctgctcagccttctctgagcctttgcagggatctgcagactcctgagggctagaggacagagaaagagaatagaatgaaatgactttgattcctgcgccttttagttttgaactctggaattcctctgccccctccccaacatttttttggaatctcaccctgttgcaaaactagagccatgtcccaagcatctcacaaaggaataactgctctgagcagagatgagtggtggttggcaggggcaggcaactttgggtgctgctgatgcctgcaaaagccatttatggcttgtggtggggggcacatagattccccggtgggttagacaggaagtaactgatatcacttcacccaaatatataaccgtgatggttatctatttaatttcagtttttgttaacgagcgtgtcttactaaaacgctccactttgagctcccccaccccctccaggtcctcagagtttgcagatctgggctttctaaagcaagtgacctgaaggctctgggctcaccatacaacacccacgttgtttatttcaaagaacttttcagcgaagggagaggagctttcagaaaaacctcactctttcccctcccttctcccctctttccttctgccggtccttttggctggggtctgagtctgcggttctcgcctgggcagtcttgacgaggagcaaaccccgccttcagagggcagacaaagcaggtggcatgaattgatcagcgagaaaggtgtgagccgaggcagttcctgcgttctgctacaaaaggaatggaaagggaagggaatttccccccaccatgggctgtgggagagttgaccgtattctgggcaagactccatgacccctctgattctgcagtgtacagctgtttgagagcctcatcattttacttttgaaacaggaatgatttctccttaattgcttaaggccggggagcaaagtgtcttaacttctgtctttgactttcccagcgttgagtcatcaacactttgccaattagctcatggtcctggcaacctcagaaacccctgaagttttaaaaactttctcgctccccacgaccccagaatgaaacagctttaaaaatagccttaagcaaaaggatgttatttcattaaatttggtttaatggaaagaataaaagtaaatgaaaaacacaccctacacactagactccgaacactggtaatcagtactgcatagcaaactctttgggaaagaaaacgaaaatgttattgcacatgtaaaatatgaaaacttaactctgctgtgtgttaggcaatcctgtaatcttttttgactcttaaaagaaattcatttctgaaatgcttggttggaagactgtgacaatagctcatgaaattgagtgttatttttttctttcttttttaaaaaaatatgtaaagtgcagtcttctgtattcctgcatattgtatatacctgtatatgttttcctgagcagttaaataacaataaatatgacgttaatggtgaaaaaaaaaaaaaa

SEQ ID NO: 379 - DNA, 2813 bp, Homo sapiens
ctccaccgacagccaggcactgggcagcacgcactggagacccaggaccctgtgcaggagcagctccgggtgacacgaggggactgaagatactcccacaggggctcagcaggagcaatgggtaaccaaatgagtgttccccaaagagttgaagaccaagagaatgaaccagaagcagagacttaccaggacaacgcgtctgctctgaacggggttccagtggtggtgtcgacccacacagttcagcacttagaggaagtcgacttgggaataagtgtcaagacggataatgtggccacttcttcccccgagacaacggagataagtgctgttgcggatgccaacggaaagaatcttgggaaagaggccaaacccgaggcaccagctgctaaatctcgttttttcttgatgctctctcggcctgtaccaggacgtaccggagaccaagccgcagattcatcccttggatcagtgaagcttgatgtcagctccaataaagctccagcgaacaaagacccaagtgagagctggacacttccggtggcagctggaccggggcaggacacagataaaaccccagggcacgccccggcccaagacaaggtcctctctgccgccagggatcccacgcttctcccacctgagacagggggagcaggaggagaagctccctccaagcccaaggactccagcttttttgacaaattcttcaagctggacaagggacaggaaaaggtgccaggtgacagccaacaggaagccaagagggcagagcatcaagacaaggtggatgaggttcctggcttatcagggcagtccgatgatgtccctgcagggaaggacatagttgacggcaaggaaaaagaaggacaagaacttggaactgcggattgctctgtccctggggacccagaaggactggagactgcaaaggacgattcccaggcagcagctatagcagagaataataattccatcatgagtttctttaaaactctggtttcacctaacaaagctgaaacaaaaaaggacccagaagacacgggtgctgaaaagtcacccaccacttcagctgaccttaagtcagacaaagccaactttacatcccaggagacccaaggggctggcaagaattccaaaggatgcaacccatcggggcacacacagtccgtgacaacccctgaacctgcgaaggaaggcaccaaggagaaatcaggacccacctctctgcctctgggcaaactgttttggaaaaagtcagttaaagaggactcagtccccacaggtgcggaggagaatgtggtgtgtgagtcaccagtagagattataaagtccaaggaagtagaatcagccttacaaacagtggacctcaacgaaggagatgctgcacctgaacccacagaagcgaaactcaaaagagaagaaagcaaaccaagaacctctctgatggcgtttctcagacaaatgtcagtgaaaggggatggagggatcacccactcagaagaaataaatgggaaagactccagctgccaaacatcagactccacagaaaagactatcacaccgccagagcctgaaccaacaggagcaccacagaagggtaaagagggctcctcgaaggacaagaagtcagcagccgagatgaacaagcagaagagcaacaagcaggaagccaaagaaccagcccagtgcacagagcaggccacggtggacacgaactcactgcagaatggggacaagctccaaaagagacctgagaagcggcagcagtcccttgggggcttctttaaaggcctgggaccaaagcggatgttggatgctcaagtgcaaacagacccagtatccatcggaccagttggcaaacccaagtaaacaaatcagcacggttcccaccaggttctcctgccaccaagatgtgttctccttactccatctcctccccaaacacgctccatgtatatattcttctgatggccagcaaatgaaattctgcctagaaattaagcccgagctgttgtatattgaggtgtattatttacgtctctggtccagtcttttctggcaaataacagtaaagatggtttagcaggtcacctagttgggtcagaagagtcgatgatcaccaagcaggaaagggagggaatagaggaatgtgttcgggttaagtgatgaaaatggcagtggtggccgggcgtggtggctctcgcctgtaatctcagcactttgggaggccgaggcaggtggatcacctgaggtcaggagttcaagactagcctggccaacatcatgaaaccccgtctctactaaaaatacaaaaattagccaggcatggtggcacacacctgtagtcccagctactcgggagcccaacgcacgagaaccgcttgtacccaggaggtggaggttgcagtgagccgaagttgcaccattgcactccaccctgggcgacagagcaagattctatcaaaaaaaaaaggcagtggcaagtaagttatagaagagaaatgctgctagaaggaattaagcgttgtagtaaacgcgtgctcatcctctaagcttgaagaagggagacgaaaatccatttgtttaaattcacatctcaaggagggagaacccgggctgtgttgggtggttgccaatttcctagaacggaatgtgtggggtatagaaaaaggaatgaataagcgttgtttttcaaatagggtccttgtaagttattgatgagagggaaaagattgactggggagggcttaaaatgatttgggaaaacaattgcttttgaggctcagtgacaacggcaaagattacaactt

SEQ ID NO: 380 - DNA, 1701 bp, Homo sapiens
ccgcatcctagccgccgactcacacaaggcaggtgggtgaggaaatccagagttgccatggagaaaattccagtgtcagcattcttgctccttgtggccctctcctacactctggccagagataccacagtcaaacctggagccaaaaaggacacaaaggactctcgacccaaactgccccagaccctctccagaggttggggtgaccaactcatctggactcagacatatgaagaagctctatataaatccaagacaagcaacaaacccttgatgattattcatcacttggatgagtgcccacacagtcaagctttaaagaaagtgtttgctgaaaataaagaaatccagaaattggcagagcagtttgtcctcctcaatctggtttatgaaacaactgacaaacacctttctcctgatggccagtatgtccccaggattatgtttgttgacccatctctgacagttagagccgatatcactggaagatattcaaatcgtctctatgcttacgaacctgcagatacagctctgttgcttgacaacatgaagaaagctctcaagttgctgaagactgaattgtaaagaaaaaaaatctccaagcccttctgtctgtcaggccttgagacttgaaaccagaagaagtgtgagaagactggctagtgtggaagcatagtgaacacactgattaggttatggtttaatgttacaacaactattttttaagaaaaacaagttttagaaatttggtttcaagtgtacatgtgtgaaaacaatattgtatactaccatagtgagccatgattttctaaaaaaaaaaataaatgttttgggggtgttctgttttctccaacttggtctttcacagtggttcgtttaccaaataggattaaacacacacaaaatgctcaaggaagggacaagacaaaaccaaaactagttcaaatgatgaagaccaaagaccaagttatcatctcaccacaccacaggttctcactagatgactgtaagtagacacgagcttaatcaacagaagtatcaagccatgtgctttagcataaaagaatatttagaaaaacatcccaagaaaatcacatcactacctagagtcaactctggccaggaactctaaggtacacactttcatttagtaattaaattttagtcagattttgcccaacctaatgctctcagggaaagcctctggcaagtagctttctccttcagaggtctaatttagtagaaaggtcatccaaagaacatctgcactcctgaacacaccctgaagaaatcctgggaattgaccttgtaatcgatttgtctgtcaaggtcctaaagtactggagtgaaataaattcagccaacatgtgactaattggaagaagagcaaagggtggtgacgtgttgatgaggcagatggagatcagaggttactagggtttaggaaacgtgaaaggctgtggcatcagggtaggggagcattctgcctaacagaaattagaattgtgtgttaatgtcttcactctatacttaatctcacattcattaatatatggaattcctctactgcccagcccctcctgatttctttggcccctggactatggtgctgtatataatgctttgcagtatctgttgcttgtcttgattaacttttttggataaaaccttttttgaacagaaaaaaaaaaaaaaaaaaaa

SEQ ID NO: 381 - DNA, 2732 bp, Homo sapiens
cacacctttccaaggacccccaaactctgctccgtgcacgtcaaatgctcctttcccttgtgtccaaccccctacccctctccctaacacccctcttctcaacaagactcagcctctccccgaggtgggtgagcatccttgaggtttcccacccttaactgctgtgtccccggatggagccagagaaatgtggtgggggggccggggcagagtttcaacattgccccccagaaggaggagccagagatggggtctgtccaggaaaacaggatgccggagcccaggagtcgtcagcctagcagttgcctggcctccagatgcctcccaggggagcagatcctagcatgggccccaggggtgaggaagggcctggaaccagaattgtctggaaccctgatctgtaccaactttagggtcaccttccagccctgtggatggcagtggaatcaggacactcccttgaacagtgaatacgattttgccctggtcaacattggacgattagaggctgtgagcggcttgtcccgagtccagctcctccgtccagggtccctgcataaatttatccctgaggagattctgattcatggccgagacttccggctgctcagagttggttttgaggctggaggcctagagcctcaggcttttcaggtgaccatggccattgtccaagccagagctcagagcaatcaagcccaacagtattcggggataaccctgagcaaggctggccagggttctggctccagaaaaccaccaattcctctcatggagacagcggaagactgggagactgagcggaagaagcaggcagccagaggctggagggtcagcacggtcaacgagaggttcgacgtagccaccaggctccggtgtttctcctcttccttgattgtgtctggcagctcctccagcagtttccagctgattttgaattctctgagtttttccttcttgctcttcatgacagtgtcagggttcctgacacccttaccttcctgagaaataccccctgggagcgcggaaagcagagcggacaggtcagtgacttctatttttgactcgtgtttttttttccattgagatgtactctctgaagtttggtcttgatttgttttatgagaagtgaggtctgtgagtggggagggggagatttattctcattttcaggacgagacttttgccctacatctttcctagaataagaggtgagaatctcatgatttgtctctagatgtgggaggattgtgtgtaaccatcctttttcttgcttcctctgtccagttaaactcctatacacaagtctacaccccaggatactccagcctccagctgggaactcttttaacctgcagctgtctgtctgggactgggatttacgttatagcaatgcacagatactacaattccagaatcctggctatgacccagaacactgtccagattcctggctccctagaccacagccaagcttcatggttcctggaccccccagttttgtgtggctcttctctagaggagcattgacccccctgaatcagctctgtccttggcgggacagtccttccctgctggcagtctcttctcgttggctccctcgacctgctatctcctctgaaagctggctgaccaggaatggggtctcccctcacattggggagcttgccctttacctccagggctgctgctgcctgggtatctgggaccccagatcaggctctggagacgctgctacctgaggggaaggcctgaggtccaggtaagaagggaaaatagactgggagtgggacaagggacttgactctgctgaaccagatgaacaggagctggaaaggcaaggagctgaagcctctgggagtctgggaagtgaagttctactcctcttggcatcaaacaaggtttgggagtgtaggaggtgcgggaaagtgcttgtggcttagattaagtggaatttagggcatagctgaaaggggaaacagaattaaagacaccagaagtagcagagaagcagggggccagagctacaacagtattcttctctgttcctctttgcctcctccccagatgggcctctcatctcccacaatctctggcctccaggatgagctatcccatcttcaggagttattacggaaaggacaccaagaatatctcctgaggatcactccaagaaaagagatccacataccattctcaatcccactgaaattgctggcattctcaaaggcagggcagagggggatctggggtagagggagggttctgtctaatcttttttttttcttttgtatctgcacttgcagcctcagctttcatacttcagcccttaagttcactaagaaggtctgagtttctgctgcagatagtggtgttaactgctccaactcttgtcttgcttagtttctacaaatatttttgcttcttgtcatttgaaggattaagaaacaaaaacaatccagaaattgatcggtttttttaggccaatcccatcccttctggataaccagatgttaaatcatgagatcagagatgctgttcatcagtcccaacaagatggcctagaaatcgcattctcacctcgccttgctgctgctttaattccaagttctatttcttcccttatagttttctatgggaatgaggcggatacaggaaacaccctatctcctctgtatttttgtagtggaatttctatttaaggggctcattaaagcatagtatttatacac

SEQ ID NO: 382 - DNA, 419 bp, Homo sapiens
ctcttgacgactccacagataccccgaagccatggcaagcaagggcttgcaggacctgaagcaacaggtggaggggaccgcccaggaagccgtgtcagcggccggagcggcagctcagcaagtggtggaccaggccacagaggcggggcagaaagccatggaccagctggccaagaccacccaggaaaccatcgacaagactgctaaccaggcctctgacaccttctctgggatcgggaaaaaattcggcctcctgaaatgacagcagggagacttgggtcggcctcctgaaatgatagcagggagacttgggtgaccccccttccaggcgccatctagcacagcctggccctgatctccgggcagccaccacctcctcggtctgccccctcattaaaattcacgttcccaccctgaaa

SEQ ID NO: 383 - DNA, 2818 bp, Homo sapiens
ccctactccgcctctcgggatcctttaagaggcggggcttggctgccagctccgcggcccgggcaaaaggctgggactttactccgggtggcggcgaggacgagtctgtgctccatcagctgccgcacccgccgcctcccgcccccaaaccccatccccgcggttgagccacgatgagcggcagagtcggcgatctgagccccaggcagaaggaggcattggccaagtttcgggagaatgtccaggatgtgctgccggccctgccgaatccagatgactattttctcctgcgttggctccgagccagaagcttcgacctgcagaagtcggaggccatgctccggaagcatgtggagttccgaaagcaaaaggacattgacaacatcattagctggcagcctccagaggtgatccaacagtatctgtcagggggtatgtgtggctatgacctggatggctgcccagtctggtacgacataattggacctctggatgccaagggtctgctgttctcagcctccaaacaggacctgctgaggaccaagatgcgggagtgtgagctgcttctgcaagagtgtgcccaccagaccacaaagttggggaggaaggtggagaccatcaccataatttatgactgcgaggggcttggcctcaagcatctctggaagcctgctgtggaggcctatggagagtttctctgcatgtttgaggaaaattatcccgaaacactgaagcgtctttttgttgttaaagcccccaaactgtttcctgtggcctataacctcatcaaacccttcctgagtgaggacactcgtaagaagatcatggtcctgggagcaaattggaaggaggttttactgaaacatatcagccctgaccaggtgcctgtggagtatgggggcaccatgactgaccctgatggaaaccccaagtgcaaatccaagatcaactacgggggtgacatccccaggaagtattatgtgcgagaccaggtgaaacagcagtatgaacacagcgtgcagatttcccgtggctcctcccaccaagtggagtatgagatcctcttccctggctgtgtcctcaggtggcagtttatgtcagatggagcggatgttggttttgggattttcctgaagaccaagatgggagagaggcagcgggcaggggagatgacagaggtgctgcccaaccagaggtacaactcccacctggtccctgaagatgggaccctcacctgcagtgatcctggcatctatgtcctgcggtttgacaacacctacagcttcattcatgccaagaaggtcaatttcactgtggaggtcctgcttccagacaaagcctcagaagagaagatgaaacagctgggggcaggcaccccgaaataacaccttctcctatagcaggcctggccccctcagtgtctccctgtcaatttctaccccttgtagcagtcattttcgcacaaccctgaagcccaaagaaactgggctggaggacagacctcaggagctttcatttcagttaggcagaggaagagcgactgcagtgggtctccgtgtctatcaaatacctaaggagtccccaggagctggctggccatcgtgataggatctgtctgtcctgtaaactgtgccaacttcacctgtccagggacagcgaagctgggggtggcggggggcatgtaccacagggtggcagcagggaaaaaaattagaaaagggtgaaagattgggacttaacacttcagggaagtcagctgccggggagaaacttgctcctaaatgaacacataagtttagatcgcaatgaggagtagcagggtagctggttgctagagttacggtggggatcagaaactcttccaaacattttagcactgaggctggggtagcttttggcttttcccaggtctcaggaggtggcctgagtcagcacacatcttcccactcggtagacaggctggcctctccctcactttgagactttggcaactcctgggccacacggcctgcctctttgattactaatgattgtcagtgactcagagcttcctgggacttcgggtacccacccgctgttctccatgcaaacaaagcgccagggaaatgacccacagggatcgcagctgcagggagggccagggaggttgggggtgggagtgaatgctaaaagcagatcgtccagtgcccttttcagtgctaccggcctctcaccaagcagtcctccatgtgagcaaccccgagacaaaaatgctaagtgggatcaagagagcagcactcggagagggtgtttgccagtctgagtgtcccgcggtgcccgccaacccgcttcctgactgacctgagcaaggtcttactaagcagtcccatctctgtgggaggcatgcaacgcgtgcagggagttcaggtgccggtcggcgtagccaggcctggaggccccccaggcaggaggccgcccaaaggcggggccggcgtctcgcagactaggggctgggggcggccacagacggcctcgaaaccacagcccttaccccaatcccacgagccccgccaacgaaccacaggtgctgggctttagagaacatgggaaggcggccccagacctggcgggaacgcctttccctcagagccaggccccggccccgtctgggaagctcatcttgcgaagctgagggagctcagggcaaaggccaggctagcgcggaccggaaggggccgaggctgcacgggcctctgccagaacgctcaggacatcccggcctgggtttacaacgctgttaggaaaattaaccaatgaataaagcaacgttcagtgcgca

SEQ ID NO: 384 - DNA, 3380 bp, Homo sapiens
gcacaccatggtgcacttctgtggcctactcaccctccaccgggagccagtgccgctgaagagtatctctgtgagcgtgaacatttacgagtttgtggctggtgtgtctgcaactttgaactacgagaatgaggagaaagttcctttggaggccttctttgtgttccccatggatgaagactctgctgtttacagctttgaggccttggtggatgggaagaaaattgtagcagaattacaagacaagatgaaggcccgcaccaactatgagaaagccatctcccagggccaccaggccttcttattggagggggacagcagctccagggatgtcttctcttgcaatgtgggtaacctccaacctgggtcgaaggcggcagtcaccctgaagtatgtgcaggagctgcctctggaagcagatggggctctgcgctttgtgctcccagctgtcctgaatcctagataccagttctctgggtcgtctaaggacagttgccttaatgtgaagactcctatagtccctgtggaggacctgccctacacactcagcatggtcgccaccatagattcccagcatggcattgagaaggtccaatccaactgccccttgagtcctaccgagtacctaggagaggacaagacttctgctcaggtttccctggctgctggacacaagtttgatcgggacgtggaactcctgatttactacaatgaggtgcatacccccagcgtggttttggagatggggatgcctaacatgaagccaggtcatttgatgggagatccatctgcaatggtgagtttctatccaaatatcccagaagatcaaccatcaaatacctgtggagagtttatctttctcatggaccgctcgggaagtatgcagagccccatgagtagccaggatacatctcgctgcgaatacaggcagccaaggaaacactgattttgctgctgaagagtttacctataggctgttatttcaacatctatggatttggctcttcctatgaggcatgctttccggagagtgtgaagtacactcagcaaacaatggaggaggctctggggagagtgaagcttatgcaggccgacctagggggcactgaaatcttggcaccactccagaacatttacaggggaccctccatcccaggccaccccctacagctttttgtctttacagatggagaagttacagacacgtttagtgtaattaaagaagttaggatcaacagacagaaacacaggtgtttctcatttggtattggagaaggcacctccaccagcctaataaaaggtattgcccgggcatcagggggcacctcagaatttatcacaggcaaagacaggatgcagtccaaggctctcaggactctgaaacgctctctgcagcctgtggtagaggatgtctctctgagctggcatttgcctcctggtctgtctgctaaaatgctttccccagaacagactgtcatctttaggggtcagagattaatcagctatgcccagctgaccgggaggatgccagcagcagagacaacaggagaagtatgcctcaaatatacactccagggcaagacttttgaggataaggtgacatttcctctacaacccaagcctgatgtcaacctcaccattcaccgccttgctgccaagtccttgctccagaccaaggacatgggcctcagggagactccagcaagtgataaaaaagatgcattgaaccttagccttgagtctggtgtcataagctccttcacagctttcattgctatcaataaggagctcaacaagccggttcaggggcctctggctcatagggacgtcccaaggccaattctgttgggtgcttctgccccattgaagataaaatgccaatcaggttttcgaaaggccttacactctgaccgtcctccttctgcatctcagcccagaggggaacttatgtgttataaggccaagacattccagatggacgattacagtctctgtgggttgataagtcacaaggaccagcacagtccaggctttggagagaatcaccttgtgcagctgatttaccaccaaaatgcaaatggttcctgggatctgaatgaagatctagccaagatcctaggtatgagtttggaagaaataatggctgcacagcctgccgagcttgtggattcctcaggctgggccaccatcctggccgtgatctggctgcacagcaatggtaaggacttgaagtgtgaatgggagcttctggaaaggaaggccgtggcctggatgcgtgcccatgcaggctccaccatgccttcggttgtgaaagctgctattactttcctgaagtcatctgtggatcctgctatctttgccttttgaagataccatccagaaaaagaagtgcctttaatttgctactgtcatttcctctagtatcacttttgctgtgatgatgtgttcttgtgtattataactctttattttttgccataaaagtaaaggatgcttactccacttcgcttctctgctccaggttcactttggatatgatctttcttttcccaacatatgccctcagaaaagtgacagtggtcccagaacctattccctttcttgagggagttcaaaacattcataggcagtaatgttcctcccagggtttccagggaaacaacatgaaaaacaggtgacatgaactacagactaaagattgcagcatttatgttagagaatgcttgaattagagaattttctgcattatctttgtctgttcactttctatcttatatacttatcagggccatactggtaagcttgcgtaggaggagttagagggaagttgaaagccaacatctggatcaatgtaatgtcaagatcacaaagacagagactgcaggggtccactgtgagaggtgacactgttggggaccttcctgattcattcttcttgggctttgctagcctgtacaacctacatgtcttttcttccactgcctgaaagacttgggttgaactataactgttggagagagatgttcctctttaatcatgaaacaccttaagaagtctataatgcaatccttagtcctaccctgaacctatgtgtcctctaagtcaggccctgatctagtgcagtaaagggaagggtgggcttaatgggagctttgcctgggacctgaacctggagcacttaccgcattaggaagaaaggagctccccgtaatcgttcctgacccttgtgtctcatataccctatcctggtggaaatgaccctatttgatatgctgtcccttaaaataacttgtatcaatattaaaatgactatttctaccctttaaaaaaaaaaaaaaaaaaaaaaaaaaaaaaaaaaaaaaaaaaaaaaaaaaaaaaaa

SEQ ID NO: 385 - DNA, 3300 bp, Homo sapiens
ggggagaatctggtggatgctggaccttgctgctgctgctactgctgtttccaggggctgcagagcatggactgttaaatcttgcacttcttctgagtgagctgaattcttgccgccaggatggggaaacagaacagcaagctgcgcccggaggtcatgcaggacttgctggaaagcacagactttacagagcatgagatccaggaatggtataaaggcttcttgagagactgccccagtggacatttgtcaatggaagagtttaagaaaatatatgggaactttttcccttatggggatgcttccaaatttgcagagcatgtcttccgcaccttcgatgcaaatggagatgggacaatagactttagagaattcatcatcgccttgagtgtaacttcgagggggaagctggagcagaagctgaaatgggccttcagcatgtacgacctggacggaaatggctatatcagcaaggcagagatgctagtgatcgtgcaggcaatctataagatggtttcctctgtaatgaaaatgcctgaagatgagtcaaccccagagaaaagaacagaaaagatcttccgccagatggacaccaatagagacggaaaactctccctggaagagttcatccgaggagccaaaagcgacccgtccattgtgcgcctcctgcagtgcgacccgagcagtgccggccagttctgagccctgcgcccaccaatcgaattgtagagctgcttgtgttcccttttgattcttctttttaacaatttttttttttttttgccaaacaatatcaatggtgatgccgtcccctgtgcggtctgatgcgccttcctccgtgacgccttcagcctcttttgtcgtggatgcttcgtgggaatgcccagagccccagtgtgcttgtggagagcatggacagacttcgtggtgttcattgtttgatgatttttaatcgttactattatttctttttattctaatgtctctgttctaaaacgtaagactcgggggttggggcaaaagaagggaaacccatccagtcctgtgattctattgcaagcttcaaggggcttttgtttgaaagacaaaactccccacctgggtctgttgtcacacgtgccgtaggggtgatggatggcaccggatgctggattccccaagaacaagttaccctctggggtgaggctattccagcgagctgggacatttccccatgggggcccactcccctctcttccccagcaggctgtagtttctaagctgtgaacatttcaagataaattaacagaggagaggaaaaagatggctcagctattttttcacaggtttacactagttgagctaatatgcgtgtctttggaaattaaacacaaatggtaacatattccaaaaccagacccatcttgttgcctattgtgataaaataaaaagacggctgtatataacatattgggtaatgcagaccaaattaagtgttttgccttgtttaaatgaaatgcatgtttagtgagcactaatacaatcttattccagaagactgtttttagtagcttattgtgaagtaagacaactataatgaatgtctgtcttgtttggaagtcatatctgtctttgcacaaatgtaccaatcgacaagtatattttatatattccataaaaatacaaagtaaccctgactagggcccaactttaattttgaatgcatttccagagtggccatgcctagagggcagatgcagagcaggtggtagtgggacaggacaattggagcacaggaatgttaacatgtatgacaggggaccagtagggtggtttccctctcaggcccagcagcccattgacagcattagactggcggcatggtgcttttctgagcagatcaatactctgcagactcgaaaaaacatcacatacattcttggaacttcccagtggtttaatctatgtgcatggttagggagccaggcctggaatattcagtttccctgcccctgttaaagaatcagaggttgggcagtcatcaaattcatcataaagacatgggcaagtgtgtctgtggtttccaaggcccccctatggagaatccaaaagtattttccattgccgtgctctttgaatgcagacttctatttccagaagtgacagcacaagtctgagttgctgtttggtctggtgacctcagacacactaatttgaattgaaagctaagagtaaaaatttgctggttacaggcgagtcatactcttgcaagtagttagcaaagggaggcccaaattctcaaggttgttgatggggaacttgccactaagagaaggcagagaggtccctagtgggtatatttgctgccaagccacttgccaaagaagaggaaccacagaaagagagacatcatgaccaggagaaaaatgtgactagacatgctaacctccaggtttttatatatgacttgagtctgctgtaattggcagcagaaatccaaatttgtatggtagaccaaaaagaaccaaatccatagggtgaaattttgagacctagactctgtaaaaataatcctagtcttcctccaggggtcagttcctcacagtggttctgtaccaaaacttgccaaattcctccatggccaagtgttaaaatctgtgtttggaaaatagcgaattaacctaagacacagaaggcagactgggtgaggagacctagcatgccctattggcagtgctcaggagctgcatcccacttttccctgctctgaatcgaagtcctagttccttcctttgattctcctttggtaggtggaatcagttaatgttttgagaaacctgcctgggctctgcccttagtcatgacatctcgctgagccagacccactctgttccttggaacctagagctggagtgaggagtagaggtctccggctattccagaaagaaaagtgagccacatgcaggctgatgaatgccgacacttccagaatgtatagaaatagtccctgtcctggcctgccactgaccctgtctgtattttctcggaggttgtttttctccttctccttcccaggaaggtctttgtatgtcgaatccagtgcactcaagtttggccaagggactccacagcacccagaggactgcatgcctcaaggtttatgtcactcctctgctgggctgttcattgtcattgctgtgttcagggacctttggaaataaaacctgttctgtcccaaataaaaccagcctgtgatgttcaagggactggaataaagtggcttacgacctgaaggattctaaaaaaaaaaaaaaaaaaaaa

SEQ ID NO: 386 - DNA, 1760 bp, Homo sapiens
gcagcaggccaagggggaggtgcgagcgtggacctgggacgggtctgggcggctctcggtggttggcacgggttcgcacacccattcaagcggcaggacgcacttgtcttagcagttctcgctgaccgcgctagctgcggcttctacgctccggcactctgagttcatcagcaaacgccctggcgtctgtcctcaccatgcctagcctttgggaccgcttctcgtcgtcgtccacctcctcttcgccctcgtccttgccccgaactcccaccccagatcggccgccgcgctcagcctgggggtcggcgacccgggaggaggggtttgaccgctccacgagcctggagagctcggactgcgagtccctggacagcagcaacagtggcttcgggccggaggaagacacggcttacctggatggggtgtcgttgcccgacttcgagctgctcagtgaccctgaggatgaacacttgtgtgccaacctgatgcagctgctgcaggagagcctggcccaggcgcggctgggctctcgacgccctgcgcgcctgctgatgcctagccagttggtaagccaggtgggcaaagaactactgcgcctggcctacagcgagccgtgcggcctgcggggggcgctgctggacgtctgcgtggagcagggcaagagctgccacagcgtgggccagctggcactcgaccccagcctggtgcccaccttccagctgaccctcgtgctgcgcctggactcacgactctggcccaagatccaggggctgtttagctccgccaactctcccttcctccctggcttcagccagtccctgacgctgagcactggcttccgagtcatcaagaagaagctgtacagctcggaacagctgctcattgaggagtgttgaacttcaacctgagggggccgacagtgccctccaagacagagacgactgaacttttggggtggagactagaggcaggagctgagggactgattccagtggttggaaaactgaggcagccacctaaggtggaggtgggggaatagtgtttcccaggaagctcattgagttgtgtgcgggtggctgtgcattggggacacatacccctcagtactgtagcatggaacaaaggcttaggggccaacaaggcttccagctggatgtgtgtgtagcatgtaccttattatttttgttactgacagttaacagtggtgtgacatccagagagcagctgggctgctcccgccccagcctggcccagggtgaaggaagaggcacgtgctcctcagagcagccggagggaggggggaggtcggaggtcgtggaggtggtttgtgtatcttactggtctgaagggaccaagtgtgtttgttgtttgttttgtatcttgtttttctgatcggagcatcactactgacctgttgtaggcagctatcttacagacgcatgaatgtaagagtaggaaggggtgggtgtcagggatcacttgggatctttgacacttgaaaaattacacctggcagctgcgtttaagccttcccccatcgtgtactgcagagttgagctggcaggggaggggctgagagggtgggggctggaacccctccccgggaggagtgccatctgggtcttccatctagaactgtttacatgaagataagatactcactgttcatgaatacacttgatgttcaagtattaagacctatgcaatattttttacttttctaataaacatgtttgttaaaacaaaaaaaaaaaaaaaaa

SEQ ID NO: 387 - DNA, 1698 bp, Homo sapiens
ggttactcatcctgggctcaggtaagagggcccgagctcggaggcggcacacccaggggggacgccaagggagcaggacggagccatggaccccgccaggaaagcaggtgcccaggccatgatctggactgcaggctggctgctgctgctgctgcttcgcggaggagcgcaggccctggagtgctacagctgcgtgcagaaagcagatgacggatgctccccgaacaagatgaagacagtgaagtgcgcgccgggcgtggacgtctgcaccgaggccgtgggggcggtggagaccatccacggacaattctcgctggcagtgcsgggttgcggttcgggactccccggcaagaatgaccgcggcctggatcttcacgggcttctggcgttcatccagctgcagcaatgcgctcaggatcgctgcaacgccaagctcaacctcacctcgcgggcgctcgacccggcaggtaatgagagtgcatacccgcccaacggcgtggagtgctacagctgtgtgggcctgagccgggaggcgtgccagggtacatcgccgccggtcgtgagctgctacaacgccagcgatcatgtctacaagggctgcttcgacggcaacgtcaccttgacggcagctaatgtgactgtgtccttgcctgtccggggctgtgtccaggatgaattctgcactcgggatggagtaacaggcccagggttcacgctcagtggctcctgttgccaggggtcccgctgtaactctgacctccgcaacaagacctacttctcccctcgaatcccaccccttgtccggctgccccctccagagcccacgactgtggcctcaaccacatctgtcaccacttctacctcggccccagtgagacccacatccaccaccaaacccatgccagcgccaaccagtcagactccgagacagggagtagaacacgaggcctcccgggatgaggagcccaggttgactggaggcgccgctggccaccaggaccgcagcaattcagggcagtatcctgcaaaaggggggccccagcagccccataataaaggctgtgtggctcccacagctggattggcagcccttctgttggccgtggctgctggtgtcctactgtgagcttctccacctggaaatttccctctcacctacttctctggccctgggtacccctcttctcatcacttcctgttcccaccactggactgggctggcccagcccctgtttttccaacattccccagtatccccagcttctgctgcgctggtttgcggctttgggaaataaaataccgttgtatatattctggcaggggtgttctagctttttgaggacagctcctgtatccttctcatccttgtctctccgcttgtcctcttgtgatgttaggacagagtgagagaagtcagctgtcacggggaaggtgagagagaggatgctaagcttcctactcactttctcctagccagcctggactttggagcgtggggtgggtgggacaatggctccccactctaagcactgcctcccctactccccgcatctttggggaatcggttccccatatgtcttccttactagactgtgagctcctcgagggcagggaccgtgccttatgtctgtgtgtgatcagtttctggcacataaatgcctcaataaagatttaattactttgtatagtgaaaaaaaa

SEQ ID NO: 388 - DNA, 3052 bp, Homo sapiens
caggaccatggaactcagcgtcctcctcttccttgcactcctcacaggactcttgctactcctggttcagcgccaccctaacacccatgaccgcctcccaccagggccccgccctctgccccttttgggaaaccttctgcagatggatagaagaggcctactcaaatcctttctgaggttccgagagaaatatggggacgtcttcacggtacacctgggaccgaggcccgtggtcatgctgtgtggagtagaggccatacgggaggcccttgtggacaaggctgaggccttctctggccggggaaaaatcgccatggtcgacccattcttccggggatatggtgtgatctttgccaatggaaaccgctggaaggtgcttcggcgattctctgtgaccactatgagggacttcgggatgggaaagcggagtgtggaggagcggattcaggaggaggctcagtgtctgatagaggagcttcggaaatccaagggggccctcatggaccccaccttcctcttccagtccattaccgccaacatcatctgctccatcgtctttggaaaacgattccactaccaagatcaagagttcctgaagatgctgaacttgttctaccagactttttcactcatcagctctgtattcggccagctgtttgagctcttctctggcttcttgaaatactttcctggggcacacaggcaagtttacaaaaacctgcaggaaatcaatgcttacattggccacagtgtggagaagcaccgtgaaaccctggaccccagcgcccccaaggacctcatcgacacctacctgctccacatggaaaaagagaaatccaacgcacacagtgaattcagccaccagaacctcaacctcaacacgctctcgctcttctttgctggcactgagaccaccagcaccactctccgctacggcttcctgctcatgctcaaataccctcatgttgcagagagagtctacagggagattgaacaggtgattggcccacatcgccctccagagcttcatgaccgagccaaaatgccatacacagaggcagtcatctatgagattcagagattttccgaccttctccccatgggtgtgccccacattgtcacccaacacaccagcttccgagggtacatcatccccaaggacacagaagtatttctcatcctgagcactgctctccatgacccacactactttgaaaaaccagacgccttcaatcctgaccactttctggatgccaatggggcactgaaaaagactgaagcttttatccccttctccttagggaagcggatttgtcttggtgaaggcatcgcccgtgcggaattgttcctcttcttcaccaccatcctccagaacttctccatggccagccccgtggccccagaagacatcgatctgacaccccaggagtgtggtgtgggcaaaatacccccaacataccagatccgcttcctgccccgctgaaggggctgagggaagggggtcaaaggattccagggtcattcagtgtccccgcctctgtagacaatggctctgactccccgcaacttcctgcctctgagagacctgctacaagccagcttccttcccctccatggcaccagttgtctgaggtcacattgcaagtgagtgcaggagtgagattatcgaaaattataatatacaaaatcatatatatatatatgttcttgttttttgagacagagtctcacactgttgcccaggctggagtgcagtggcgtgatctcggctcactgcaacctccacccccggggatcaagcaactctcctgcctcagcctccctagtagctgggattacaggcatgcactaccacgcttggctaatttttgtatttttagtagagatggggtttcactgtgtaggccaggctggtctcgaactcctgaactcaagtgattcacccaccttagcctcccaaagtgctgggattacaggcgtgagtcaccgtgcccagccatgtatatatataattttaaaaattaagctgaaattcacataacataaaattagctgttttaaagtgtaaaatttagtggcgtgtggttcattcacaaagctgtacaaccaccaccatctagttccaaacattttctttttttctgagatggagtctcactctgtcacccaggttcgagttcagtggtgccatctctgtccactgcaacctccacatcctgggttcaagtgattctcctgcctcagcctctggaggagctggtatcacaggcgtcccccaccacgcctggctaaattttgtatttttaggtggtcttgaactcctgatgtcaggtgattctcctagctccaaatgttttcattatctctcccccaacaaaacccatacctatcaagctgtcactccccataccccattctctttttcatctcggcccctgtcaatctggtttttgtcactatggacttaccaattctgaatatttcccataaacagaatcatacaatatttgattttttttttttttttgaaactaagccttgctctgtctcccaggctggagtgctatggtgcaatttttgttcactgcaacctctgccttccaagatcaagagattctccagtctcagctcccaagtagctgggattacaggcatgtactaccatgcctggctaattttcttgtagttttagtagggacatgttggccaggctggtggtgagctcctggcctcaggtgatccacccacctcagtgttccaaagtgctgatattacaggcataatatgtgatcttttgtgtctggttgctttcatgttgaatgctatttttgaggttcatgcctgttgtagaccacagtcacacactgctgtagtcttccccagtcctcattcccagctgcctcttcctactgcttccgtctatcaaaaagcccccttggcccaggttccctgagctgtgggattctgcactggtgctttggattccctgatatgttccttcaaatctgctgagaattaaataaacatctctaaagcctgacctccccacgtc

SEQ ID NO: 389 - DNA, 1707 bp, Homo sapiens
gggaagctccaggcaaacagcccagcaaacagcagcactcagctaaaaggaagactcacagaacacagttgaagaaggaaagtggcgatggacctcatcccaaatttggcggtggaaacctggcttctcctggctgtcagcctggtgctcctctatctatatgggacccgtacacatggactttttaagagactgggaattccagggcccacacctctgcctttgttgggaaatgttttgtcctatcgtcagggtctctggaaatttgacacagagtgctataaaaagtatggaaaaatgtggggaacgtatgaaggtcaactccctgtgctggccatcacagatcccgacgtgatcagaacagtgctagtgaaagaatgttattctgtcttcacaaatcgaaggtctttaggcccagtgggatttatgaaaagtgccatctctttagctgaggatgaagaatggaagagaatacggtcattgctgtctccaaccttcaccagcggaaaactcaaggagatgttccccatcattgcccagtatggagatgtattggtgagaaacttgaggcgggaagcagagaaaggcaagcctgtcaccttgaaagacatctttggggcctacagcatggatgtgattactggcacatcatttggagtgaacatcgactctctcaacaatccacaagacccctttgtggagagcactaagaagttcctaaaatttggtttcttagatccattatttctctcaataatactctttccattccttaccccagtttttgaagcattaaatgtctctctgtttccaaaagataccataaattttttaagtaaatctgtaaacagaatgaagaaaagtcgcctcaacgacaaacaaaagcaccgactagatttccttcagctgatgattgactcccagaattcgaaagaaactgagtcccacaaagctctgtctgatctggagctcgcagcccagtcaataatcttcatttttgctggctatgaaaccaccagcagtgttctttccttcactttatatgaactggccactcaccctgatgtccagcagaaactgcaaaaggagattgatgcagttttgcccaataaggcaccacctacctatgatgccgtggtacagatggagtaccttgacatggtggtgaatgaaacactcagattattcccagttgctattagacttgagaggacttgcaagaaagatgttgaaatcaatggggtattcattcccaaagggtcaatggtggtgattccaacttatgctcttcaccatgacccaaagtactggacagagcctgaggagttccgccctgaaaggttcagtaagaagaaggacagcatagatccttacatatacacaccctttggaactggacccagaaactgcattggcatgaggtttgctctcatgaacatgaaacttgctctaatcagagtccttcagaacttctccttcaaaccttgtaaagaaacacagatccccttgaaattagacacgcaaggacttcttcaaccagaaaaacccattgttctaaaggtggattcaagagatggaaccctaagtggagaatgagttattctaaggatttctactttggtcttcaagaaagctgtgccccagaacaccagagatttcaacttagtcaataaaaccttgaaataaagatgggcttaatctaatgta

SEQ ID NO: 390 - DNA, 2015 bp, Homo sapiens
tcgctgcgaaggacatttgggctgtgtgtgcgacgcgggtcggaggggcagtcgggggaaccgcgaagaagccgaggagcccggagccccgcgtgacgctcctctctcagtccaaaagcggcttttggttcggcgcagagagacccgggggtctagcttttcctcgaaaagcgccgccctgcccttggccccgagaacagacaaagagcaccgcagggccgatcacgctgggggcgctgaggccggccatggtcatggaagtgggcaccctggacgctggaggcctgcgggcgctgctgggggagcgagcggcgcaatgcctgctgctggactgccgctccttcttcgctttcaacgccggccacatcgccggctctgtcaacgtgcgcttcagcaccatcgtgcggcgccgggccaagggcgccatgggcctggagcacatcgtgcccaacgccgagctccgcggccgcctgctggccggcgcctaccacgccgtggtgttgctggacgagcgcagcgccgccctggacggcgccaagcgcgacggcaccctggccctggcggccggcgcgctctgccgcgaggcgcgcgccgcgcaagtcttcttcctcaaaggaggatacgaagcgttttcggcttcctgcccggagctgtgcagcaaacagtcgacccccatggggctcagccttcccctgagtactagcgtccctgacagcgcggaatctgggtgcagttcctgcagtaccccactctacgatcagggtggcccggtggaaatcctgccctttctgtacctgggcagtgcgtatcacgcttcccgcaaggacatgctggatgccttgggcataactgccttgatcaacgtctcagccaattgtcccaaccattttgagggtcactaccagtacaagagcatccctgtggaggacaaccacaaggcagacatcagctcctggttcaacgaggccattgacttcatagactccatcaagaatgctggaggaagggtgtttgtccactgccaggcaggcatttcccggtcagccaccatctgccttgcttaccttatgaggactaatcgagtcaagctggacgaggcctttgagtttgtgaagcagaggcgaagcatcatctctcccaacttcagcttcatgggccagctgctgcagtttgagtcccaggtgctggctccgcactgttcggcagaggctgggagccccgccatggctgtgctcgaccgaggcacctccaccaccaccgtgttcaacttccccgtctccatccctgtccactccacgaacagtgcgctgagctaccttcagagccccattacgacctctcccagctgctgaaaggccacgggaggtgaggctcttcacatcccattgggactccatgctccttgagaggagaaatgcaataactctgggaggggctcgagagggctggtccttatttatttaacttcacccgagttcctctgggtttctaagcagttatggtgatgacttagcgtcaagacatttgctgaactcagcacattcgggaccaatatatagtgggtacatcaagtccatctgacaaaatggggcagaagagaaaggactcagtgtgtgatccggtttctttttgctcgcccctgttttttgtagaatctcttcatgcttgacatacctaccagtattattcccgacgacacatatacatatgagaatataccttatttatttttgtgtaggtgtctgccttcacaaatgtcattgtctactcctagaagaaccaaatacctcaatttttgtttttgagtactgtactatcctgtaaatatatcttaagcaggtttgttttcagcactgatggaaaataccagtgttgggtttttttttagttgccaacagttgtatgtttgctgattatttatgacctgaaataatatatttcttcttctaagaagacattttgttacataaggatgacttttttatacaatggaataaattatggcatttctattg

SEQ ID NO: 391 - DNA, 7941 bp, Homo sapiens
cacacatacgcacgcacgatctcacttcgatctatacactggaggattaaaacaaacaaacaaaaaaaacatttccttcgctccccctccctctccactctgagaagcagaggagccgcacggcgaggggccgcagaccgtctggaaatgcgaatcctaaagcgtttcctcgcttgcattcagctcctctgtgtttgccgcctggattgggctaatggatactacagacaacagagaaaacttgttgaagagattggctggtcctatacaggagcactgaatcaaaaaaattggggaaagaaatatccaacatgtaatagcccaaaacaatctcctatcaatattgatgaagatcttacacaagtaaatgtgaatcttaagaaacttaaatttcagggttgggataaaacatcattggaaaacacattcattcataacactgggaaaacagtggaaattaatctcactaatgactaccgtgtcagcggaggagtttcagaaatggtgtttaaagcaagcaagataacttttcactggggaaaatgcaatatgtcatctgatggatcagagcatagtttagaaggacaaaaatttccacttgagatgcaaatctactgctttgatgcggaccgattttcaagttttgaggaagcagtcaaaggaaaagggaagttaagagctttatccattttgtttgaggttgggacagaagaaaatttggatttcaaagcgattattgatggagtcgaaagtgttagtcgttttgggaagcaggctgctttagatccattcatactgttgaaccttctgccaaactcaactgacaagtattacatttacaatggctcattgacatctcctccctgcacagacacagttgactggattgtttttaaagatacagttagcatctctgaaagccagttggctgttttttgtgaagttcttacaatgcaacaatctggttatgtcatgctgatggactacttacaaaacaattttcgagagcaacagtacaagttctctagacaggtgttttcctcatacactggaaaggaagagattcatgaagcagtttgtagttcagaaccagaaaatgttcaggctgacccagagaattataccagccttcttgttacatgggaaagacctcgagtcgtttatgataccatgattgagaagtttgcagttttgtaccagcagttggatggagaggaccaaaccaagcatgaatttttgacagatggctatcaagacttgggtgctattctcaataatttgctacccaatatgagttatgttcttcagatagtagccatatgcactaatggcttatatggaaaatacagcgaccaactgattgtcgacatgcctactgataatcctgaacttgatcttttccctgaattaattggaactgaagaaataatcaaggaggaggaagagggaaaagacattgaagaaggcgctattgtgaatcctggtagagacagtgctacaaaccaaatcaggaaaaaggaaccccagatttctaccacaacacactacaatcgcatagggacgaaatacaatgaagccaagactaaccgatccccaacaagaggaagtgaattctctggaaagggtgatgttcccaatacatctttaaattccacttcccaaccagtcactaaattagccacagaaaaagatatttccttgacttctcagactgtgactgaactgccacctcacactgtggaaggtacttcagcctctttaaatgatggctctaaaactgttcttagatctccacatatgaacttgtcggggactgcagaatccttaaatacagtttctataacagaatatgaggaggagagtttattgaccagtttcaagcttgatactggagctgaagattcttcaggctccagtcccgcaacttctgctatcccattcatctctgagaacatatcccaagggtatatattttcctccgaaaacccagagacaataacatatgatgtccttataccagaatctgctagaaatgcttccgaagattcaacttcatcaggttcagaagaatcactaaaggatccttctatggagggaaatgtgtggtttcctagctctacagacataacagcacagcccgatgttggatcaggcagagagagctttctccagactaattacactgagatacgtgttgatgaatctgagaagacaaccaagtccttttctgcaggcccagtgatgtcacagggtccctcagttacagatctggaaatgccacattattctacctttgcctacttcccaactgaggtaacacctcatgcttttaccccatcctccagacaacaggatttggtctccacggtcaacgtggtatactcgcagacaacccaaccggtatacaatggtgagacacctcttcaaccttcctacagtagtgaagtctttcctctagtcacccctttgttgcttgacaatcagatcctcaacactacccctgctgcttcaagtagtgattcggccttgcatgctacgcctgtatttcccagtgtcgatgtgtcatttgaatccatcctgtcttcctatgatggtgcacctttgcttccattttcctctgcttccttcagtagtgaattgtttcgccatctgcatacagtttctcaaatccttccacaagttacttcagctaccgagagtgataaggtgcccttgcatgcttctctgccagtggctgggggtgatttgctattagagcccagccttgctcagtattctgatgtgctgtccactactcatgctgcttcagagacgctggaatttggtagtgaatctggtgttctttataaaacgcttatgttttctcaagttgaaccacccagcagtgatgccatgatgcatgcacgttcttcagggcctgaaccttcttatgccttgtctgataatgagggctcccaacacatcttcactgtttcttacagttctgcaatacctgtgcatgattctgtgggtgtaacttatcagggttccttatttagcggccctagccatataccaatacctaagtcttcgttaataaccccaactgcatcattactgcagcctactcatgccctctctggtgatggggaatggtctggagcctcttctgatagtgaatttcttttacctgacacagatgggctgacagcccttaacatttcttcacctgtttctgtagctgaatttacatatacaacatctgtgtttggtgatgataataaggcgctttctaaaagtgaaataatatatggaaatgagactgaactgcaaattccttctttcaatgagatggtttacccttctgaaagcacagtcatgcccaacatgtatgataatgtaaataagttgaatgcgtctttacaagaaacctctgtttccatttctagcaccaagggcatgtttccagggtcccttgctcataccaccactaaggtttttgatcatgagattagtcaagttccagaaaataacttttcagttcaacctacacatactgtctctcaagcatctggtgacacttcgcttaaacctgtgcttagtgcaaactcagagccagcatcctctgaccctgcttctagtgaaatgttatctccttcaactcagctcttattttatgagacctcagcttcttttagtactgaagtattgctacaaccttcctttcaggcttctgatgttgacaccttgcttaaaactgttcttccagctgtgcccagtgatccaatattggttgaaacccccaaagttgataaaattagttctacaatgttgcatctcattgtatcaaattctgcttcaagtgaaaacatgctgcactctacatctgtaccagtttttgatgtgtcgcctacttctcatatgcactctgcttcacttcaaggtttgaccatttcctatgcaagtgagaaatatgaaccagttttgttaaaaagtgaaagttcccaccaagtggtaccttctttgtacagtaatgatgagttgttccaaacggccaatttggagattaaccaggcccatcccccaaaaggaaggcatgtatttgctacacctgttttatcaattgatgaaccattaaatacactaataaataagcttatacattccgatgaaattttaacctccaccaaaagttctgttactggtaaggtatttgctggtattccaacagttgcttctgatacatttgtatctactgatcattctgttcctataggaaatgggcatgttgccattacagctgtttctccccacagagatggttctgtaacctcaacaaagttgctgtttccttctaaggcaacttctgagctgagtcatagtgccaaatctgatgccggtttagtgggtggtggtgaagatggtgacactgatgatgatggtgatgatgatgatgacagagatagtgatggcttatccattcataagtgtatgtcatgctcatcctatagagaatcacaggaaaaggtaatgaatgattcagacacccacgaaaacagtcttatggatcagaataatccaatctcatactcactatctgagaattctgaagaagataatagagtcacaagtgtatcctcagacagtcaaactggtatggacagaagtcctggtaaatcaccatcagcaaatgggctatcccaaaagcacaatgatggaaaagaggaaaatgacattcagactggtagtgctctgcttcctctcagccctgaatctaaagcatgggcagttctgacaagtgatgaagaaagtggatcagggcaaggtacctcagatagccttaatgagaatgagacttccacagatttcagttttgcagacactaatgaaaaagatgctgatgggatcctggcagcaggtgactcagaaataactcctggattcccacagtccccaacatcatctgttactagcgagaactcagaagtgttccacgtttcagaggcagaggccagtaatagtagccatgagtctcgtattggtctagctgaggggttggaatccgagaagaaggcagttataccccttgtgatcgtgtcagccctgacttttatctgtctagtggttcttgtgggtattctcatctactggaggaaatgcttccagactgcacacttttacttagaggacagtacatcccctagagttatatccacacctccaacacctatctttccaatttcagatgatgtcggagcaattccaataaagcactttccaaagcatgttgcagatttacatgcaagtagtgggtttactgaagaatttgagacactgaaagagttttaccaggaagtgcagagctgtactgttgacttaggtattacagcagacagctccaaccacccagacaacaagcacaagaatcgatacataaatatcgttgcctatgatcatagcagggttaagctagcacagcttgctgaaaaggatggcaaactgactgattatatcaatgccaattatgttgatggctacaacagaccaaaagcttatattgctgcccaaggcccactgaaatccacagctgaagatttctggagaatgatatgggaacataatgtggaagttattgtcatgataacaaacctcgtggagaaaggaaggagaaaatgtgatcagtactggcctgccgatgggagtgaggagtacgggaactttctggtcactcagaagagtgtgcaagtgcttgcctattatactgtgaggaattttactctaagaaacacaaaaataaaaaagggctcccagaaaggaagacccagtggacgtgtggtcacacagtatcactacacgcagtggcctgacatgggagtaccagagtactccctgccagtgctgacctttgtgagaaaggcagcctatgccaagcgccatgcagtggggcctgttgtcgtccactgcagtgctggagttggaagaacaggcacatatattgtgctagacagtatgttgcagcagattcaacacgaaggaactgtcaacatatttggcttcttaaaacacatccgttcacaaagaaattatttggtacaaactgaggagcaatatgtcttcattcatgatacactggttgaggccatacttagtaaagaaactgaggtgctggacagtcatattcatgcctatgttaatgcactcctcattcctggaccagcaggcaaaacaaagctagagaaacaattccagctcctgagccagtcaaatatacagcagagtgactattctgcagccctaaagcaatgcaacagggaaaagaatcgaacttcttctatcatccctgtggaaagatcaagggttggcatttcatccctgagtggagaaggcacagactacatcaatgcctcctatatcatgggctattaccagagcaatgaattcatcattacccagcaccctctccttcataccatcaaggatttctggaggatgatatgggaccataatgcccaactggtggttatgattcctgatggccaaaacatggcagaagatgaatttgtttactggccaaataaagatgagcctataaattgtgagagctttaaggtcactcttatggctgaagaacacaaatgtctatctaatgaggaaaaacttataattcaggactttatcttagaagctacacaggatgattatgtacttgaagtgaggcactttcagtgtcctaaatggccaaatccagatagccccattagtaaaacttttgaacttataagtgttataaaagaagaagctgccaatagggatgggcctatgattgttcatgatgagcatggaggagtgacggcaggaactttctgtgctctgacaacccttatgcaccaactagaaaaagaaaattccgtggatgtttaccaggtagccaagatgatcaatctgatgaggccaggagtctttgctgacattgagcagtatcagtttctctacaaagtgatcctcagccttgtgagcacaaggcaggaagagaatccatccacctctctggacagtaatggtgcagcattgcctgatggaaatatagctgagagcttagagtctttagtttaacacagaaaggggtggggggactcacatctgagcattgttttcctcttcctaaaattaggcaggaaaatcagtctagttctgttatctgttgatttcccatcacctgacagtaactttcatgacataggattctgccgccaaatttatatcattaacaatgtgtgcctttttgcaagacttgtaatttacttattatgtttgaactaaaatgattgaattttacagtatttctaagaatggaattgtggtatttttttctgtattgattttaacagaaaatttcaatttatagaggttaggaattccaaactacagaaaatgtttgtttttagtgtcaaatttttagctgtatttgtagcaattatcaggtttgctagaaatataacttttaatacagtagcctgtaaataaaacactcttccatatgatattcaacattttacaactgcagtattcacctaaagtagaaataatctgttacttattgtaaatactgccctagtgtctccatggaccaaatttatatttataattgtagatttttatattttactactgagtcaagttttctagttctgtgtaattgtttagtttaatgacgtagttcattagctggtcttactctaccagttttctgacattgtattgtgttacctaagtcattaactttgtttcagcatgtaattttaacttttgtggaaaatagaaataccttcattttgaaagaagtttttatgagaataacaccttaccaaacattgttcaaatggtttttatccaaggaattgcaaaaataaatataaatattgccattaaaaaaaaaaaaaaaaaaaaaaaaaaaaaaaaaaa

SEQ ID NO: 392 - DNA, 2506 bp, Homo sapiens
ggcacgaggcacagcttcgcgccgtgtactgtcgccccatccctgcgcgcccagcctgccaagcagcgtgccccggttgcaggcgtcatgcagcgggcgcgacccacgctctgggccgctgcgctgactctgctggtgctgctccgcgggccgccggtggcgcgggctggcgcgagctcggggggcttgggtcccgtggtgcgctgcgagccgtgcgacgcgcgtgcactggcccagtgcgcgcctccgcccgccgtgtgcgcggagctggtgcgcgagccgggctgcggctgctgcctgacgtgcgcactgagcgagggccagccgtgcggcatctacaccgagcgctgtggctccggccttcgctgccagccgtcgcccgacgaggcgcgaccgctgcaggcgctgctggacggccgcgggctctgcgtcaacgctagtgccgtcagccgcctgcgcgcctacctgctgccagcgccgccagctccaggaaatgctagtgagtcggaggaagaccgcagcgccggcagtgtggagagcccgtccgtctccagcacgcaccgggtgtctgatcccaagttccaccccctccattcaaagataatcatcatcaagaaagggcatgctaaagacagccagcgctacaaagttgactacgagtctcagagcacagatacccagaacttctcctccgagtccaagcgggagacagaatatggtccctgccgtagagaaatggaagacacactgaatcacctgaagttcctcaatgtgctgagtcccaggggtgtacacattcccaactgtgacaagaagggattttataagaaaaagcagtgtcgcccttccaaaggcaggaagcggggcttctgctggtgtgtggataagtatgggcagcctctcccaggctacaccaccaaggggaaggaggacgtgcactgctacagcatgcagagcaagtagacgcctgccgcaaggttaatgtggagctcaaatatgccttattttgcacaaaagactgccaaggacatgaccagcagctggctacagcctcgatttatatttctgtttgtggtgaactgattttttttaaaccaaagtttagaaagaggtttttgaaatgcctatggtttctttgaatggtaaacttgagcatcttttcactttccagtagtcagcaaagagcagtttgaattttcttgtcgcttcctatcaaaatattcagagactcgagcacagcacccagacttcatgcgcccgtggaatgctcaccacatgttggtcgaagcggccgaccactgactttgtgacttaggcggctgtgttgcctatgtagagaacacgcttcacccccactccccgtacagtgcgcacaggctttatcgagaataggaaaacctttaaaccccggtcatccggacatcccaacgcatgctcctggagctcacagccttctgtggtgtcatttctgaaacaagggcgtggatccctcaaccaagaagaatgtttatgtcttcaagtgacctgtactgcttggggactattggagaaaataaggtggagtcctacttgtttaaaaaatatgtatctaagaatgttctagggcactctgggaacctataaaggcaggtatttcgggccctcctcttcaggaatcttcctgaagacatggcccagtcgaaggcccaggatggcttttgctgcggccccgtggggtaggagggacagagagacagggagagtcagcctccacattcagaggcatcacaagtaatgtcacaattcttcggatgactgcagaaaatagtgttttgtagttcaacaactcaagacgaagcttatttctgaggataagctctttaaaggcaaagctttattttcatctctcatcttttgtcctccttagcacaatgtaaaaaagaatagtaatatcagaacaggaaggaggaatggcttgctggggagcccatccaggacactgggagcacatagagattcacccatgtttgttgaacttagagtcattctcatgcttttctttataattcacacatatatgcagagaagatatgttcttgttaacattgtatacaacatagccccaaatatagtaagatctatactagataatcctagatgaaatgttagagatgctatttgatacaactgtggccatgactgaggaaaggagctcacgcccagagactgggctgctctcccggaggccaaacccaagaaggtctggcaaagtcaggctcagggagactctgccctgctgcagacctcggtgtggacacacgctgcatagagctctccttgaaaacagaggggtctcaagacattctgcctacctattagcttttctttatttttttaactttttggggggaaaagtatttttgagaagtttgtcttgcaatgtatttataaatagtaaataaagtttttaccattaaaaaaataaaaaaaaaaaaaaaaaaaaaaaaaaaaaaaaaaaaaaaaaaaa

SEQ ID NO: 393 - DNA, 952 bp, Homo sapiens
gcagctgcgctgcgactgctctggaaggagaggacggggcacaaaccctgaccatgaccccccacaggctgctgccaccgctgctgctgctgctagctctgctgctcgctgccagcccaggaggcgccttggcgcggtgcccaggctgcgggcaaggggtgcaggcgggttgtccagggggctgcgtggaggaggaggatggggggtcgccagccgagggctgcgcggaagctgagggctgtctcaggagggaggggcaggagtgcggggtctacacccctaactgcgccccaggactgcagtgccatccgcccaaggacgacgaggcgcctttgcgggcgctgctgctcggccgaggccgctgccttccggcccgcgcgcctgctgttgcagaggagaatcctaaggagagtaaaccccaagcaggcactgcccgcccacaggatgtgaaccgcagagaccaacagaggaatccaggcacctctaccacgccctcccagcccaattctgcgggtgtccaagacactgagatgggcccatgccgtagacatctggactcagtgctgcagcaactccagactgaggtctaccgaggggctcaaacactctacgtgcccaattgtgaccatcgaggcttctaccggaagcggcagtgccgctcctcccaggggcagcgccgaggtccctgctggtgtgtggatcggatgggcaagtccctgccagggtctccagatggcaatggaagctcctcctgccccactgggagtagcggctaaagctgggggatagaggggctgcagggccactggaaggaacatggagctgtcatcactcaacaaaaaaccgaggccctcaatccaccttcaggccccgccccatgggcccctcaccgctggttggaaagagtgttggtgttggctggggtgtcaataaagctgtgcttggggtcaaa

SEQ ID NO: 394 - DNA, 572 bp, Homo sapiens
gtacctgtctataaggagtcctgcttatcacaatgaatgttctcctgggcagcgttgtgatctttgccaccttcgtgactttatgcaatgcatcatgctatttcatacctaatgagggagttccaggagattcaaccaggaaatgcatggatctcaaaggaaacaaacacccaataaactcggagtggcagactgacaactgtgagacatgcacttgctacgaaacagaaatttcatgttgcacccttgtttctacacctgtgggttatgacaaagacaactgccaaagaatcttcaagaaggaggactgcaagtatatcgtggtggagaagaaggacccaaaaaagacctgttctgtcagtgaatggataatctaatgtgcttctagtaggcacagggctcccaggccaggcctcattctcctctggcctctaatagtcaatgattgtgtagccatgcctatcagtaaaaagatttttgagcaaacacttgaatatgtgtgtccttttaatttataatttatgtatgcattgatttaatacacattataaagaatacaaaacatttaaaaa

SEQ ID NO: 395 - DNA, 466 bp, Homo sapiens
gtacctgtctataaggagtcctgcttatcacaatgaatgttctcctgggcagcgttgtgatctttgccaccttcgtgactttatgcaatgcatcatgctatttcatacctaatgagggagttccaggagattcaaccaggatgtttctacacctgtgggttatgacaaagacaactgccaaagaatcttcaagaaggaggactgcaagtatatcgtggtggagaagaaggacccaaaaaagacctgttctgtcagtgaatggataatctaatgtgcttctagtaggcacagggctcccaggccaggcctcattctcctctggcctctaatagtcaatgattgtgtagccatgcctatcagtaaaaagatttttgagcaaacacttgaatatgtgtgtccttttaatttataatttatgtatgcattgatttaatacacattataaagaatacaaaacatttaaaaa

SEQ ID NO: 396 - DNA, 1342 bp, Homo sapiens
cggctgtaatctcagaggcttgtttgctgagggtgcctgcgcacgtgcgacggctgctggttttgaaacatgaatctttcgctcgtcctggctgccttttgcttgggaatagcctccgctgttccaaaatttgaccaaaatttggatacaaagtggtaccagtggaaggcaacacacagaagattatatggcgcgaatgaagaaggatggaggagagcagtgtgggaaaagaatatgaaaatgattgaactgcacaatggggaatacagccaagggaaacatggcttcacaatggccatgaatgcttttcctgacatgaccaatgaagaattcaggcagatgatgggttgctttcgaaaccagaaattcaggaaggggaaagtgttccgtgagcctctgtttcttgatcttcccaaatctgtggattggagaaagaaaggctacgtgacgccagtgaagaatcagaaacagtgtggttcttgttgggcttttagtgcgactggtgctcttgaaggacagatgttccggaaaactgggaaacttgtctcactgagcgagcagaatctggtggactgttcgcgtcctcaaggcaatcagggctgcaatggtggcttcatggctagggccttccagtatgtcaaggagaacggaggcctggactctgaggaatcctatccatatgtagcagtggatgaaatctgtaagtacagacctgagaattctgttgctaatgacactggcttcacagtggtcgcacctggaaaggagaaggccctgatgaaagcagtcgcaactgtggggcccatctccgttgctatggatgcaggccattcgtccttccagttctacaaatcaggcatttattttgaaccagactgcagcagcaaaaacctggatcatggtgttctggtggttggctacggctttgaaggagcaaattcgaataacagcaagtattggctcgtcaaaaacagctggggtccagaatggggctcgaatggctatgtaaaaatagccaaagacaagaacaaccactgtggaatcgccacagcagccagctaccccaatgtgtgagctgatggatggtgaggaggaaggacttaaggacagcatgtctggggaaattttatcttgaaactgaccaaacgcttattgtgtaagataaaccagttgaatcattgaggatccaagttgagattttaattctgtgacatttttacaagggtaaaatgttaccactactttaattattgttatacacagctttatgatatcaaagactcattgcttaattctaagacttttgaattttcattttttaaaaagatgtacaaaacagttt

SEQ ID NO: 397 - DNA, 1310 bp, Homo sapiens
gctcggagcccggagcgtgcctcggcggcctgtcggttttcaccatggagcagctgagctcagcaaacacccgcttcgccttggacctgttcctggcgttgagtgagaacaatccggctggaaacatcttcatctctcccttcagcatttcatctgctatggccatggtttttctggggaccagaggtaacacggcagcacagctgtccaagactttccatttcaacacggttgaagaggttcattcaagattccagagtctgaatgctgatatcaacaaacgtggagcgtcttatattctgaaacttgctaatagattatatggagagaaaacttacaatttccttcctgagttcttggtttcgactcagaaaacatatggtgctgacctggccagtgtggattttcagcatgcctctgaagatgcaaggaagaccataaaccagtgggtcaaaggacagacagaaggaaaaattccggaactgttggcttcgggcatggttgataacatgaccaaacttgtgctagtaaatgccatctatttcaagggaaactggaaggataaattcatgaaagaagccacgacgaatgcaccattcagattgaataagaaagacagaaaaactgtgaaaatgatgtatcagaagaaaaaatttgcatatggctacatcgaggaccttaagtgccgtgtgctggaactgccttaccaaggcgaggagctcagcatggtcatcctgctgccggatgacattgaggacgagtccacgggcctgaagaagattgaggaacagttgactttggaaaagttgcatgagtggactaaacctgagaatctcgatttcattgaagttaatgtcagcttgcccaggttcaaactggaagagagttacactctcaactccgacctcgcccgcctaggtgtgcaggatctctttaacagtagcaaggctgatctgtctggcatgtcaggagccagagatatttttatatcaaaaattgtccacaagtcatttgtggaagtgaatgaagagggaacagaggcggcagctgccacagcaggcatcgcaactttctgcatgttgatgcccgaagaaaatttcactgccgaccatccattccttttctttattcggcataattcctcaggtagcatcctattcttggggagattttcttccccttagaagaaagagactgtagcaatacaaaaatcaagcttagtgctttattacctgagtttttaatagagccaatatgtcttatatctttaccaataaaaccactgtccagaaaaaaaaaaaaaaaaaaaa

SEQ ID NO: 398 - DNA, 1534 bp, Homo sapiens
ggaattccctggagcagagttgagaatggagagaatgttacctctcctggctctggggctcttggcggctgggttctgccctgctgtcctctgccaccctaacagcccacttgacgaggagaatctgacccaggagaaccaagaccgagggacacacgtggacctcggattagcctccgccaacgtggacttcgctttcagcctgtacaagcagttagtcctgaaggcccttgataagaatgtcatcttctccccactgagcatctccaccgccttggccttcctgtctctgggggcccataataccaccctgacagagattctcaaggcctcgagttcacctcacggagacttactgaggcagaaattcactcagagcttccagcacctccgcgcaccctcaatcagttccagcgatgagctgcagctgagtatgggaaatgccatgtttgtcaaagagcaactcagtctgctggacaggttcacggaggatgccaagaggctgtatggctccgaggcctttgccactgactttcaggactcagctgcagctaagaagctcatcaacgactacgtgaagaatggaactagggggaaaatcacagatctgatcaaggaccccgactcgcagacaatgatggtcctggtgaattacatcttctttaaagccaaatgggagatgccctttgacccccaagatactcatcagtcaaggttctacttgagcaagaaaaagtgggtaatggtgcccatgatgagtttgcatcacctgactataccttacttccgggacgaggagctgtcctgcaccgtggtggagctgaagtacacaggcaatgccagcgcactcttcatcctccctgatcaagacaagatggaggaagtggaagccatgctgctcccagagaccctgaagcggtggagagactctctggagttcagagagataggtgagctctacctgccaaagttttccatctcgagggactataacctgaacgacatacttctccagctgggcattgaggaagccttcaccagcaaggctgacctgtcagggatcacaggggccaggaacctagcagtctcccaggtggtccataaggtcgtgtctgatgtatttgaggagggcacagaagcatctgctgccacagcagtcaaaatcaccctcctttctgcattagtggagacaaggaccattgtgcgtttcaacaggcccttcctgatgatcattgtccctacagacacccagaacatcttcttcatgagcaaagtcaccaatcccagcaagcctagagcttgcatcaagcagtggggctctcagtaaggaacttggaatgcaagctggatgcctgggtctctgggcacagctggcccctgtgcaccgtagtggccatggcatgtgtggccctgtctgcttatccttggaaggtgacagcgattccctgtgaagctctcacacgcacaggggcccatggactcttcagtctggagggtcctggcctcctgacagcaataaataatttcgttggcc

SEQ ID NO: 399 - DNA, 2876 bp, Homo sapiens
gaattcctgcagctcagcagccgccgccagagcaggacgaaccgccaatcgcaaggcacctctgagaacttcaggatgcagatgtctccagccctcacctgcctagtcctgggcctggcccttgtctttggtgaagggtctgctgtgcaccatcccccatcctacgtggcccacctggcctcagacttcggggtgagggtgtttcagcaggtggcgcaggcctccaaggaccgcaacgtggttttctcaccctatggggtggcctcggtgttggccatgctccagctgacaacaggaggagaaacccagcagcagattcaagcagctatgggattcaagattgatgacaagggcatggcccccgccctccggcatctgtacaaggagctcatggggccatggaacaaggatgagatcagcaccacagacgcgatcttcgtccagcgggatctgaagctggtccagggcttcatgccccacttcttcaggctgttccggagcacggtcaagcaagtggacttttcagaggtggagagagccagattcatcatcaatgactgggtgaagacacacacaaaaggtatgatcagcaacttgcttgggaaaggagccgtggaccagctgacacggctggtgctggtgaatgccctctacttcaacggccagtggaagactcccttccccgactccagcacccaccgccgcctcttccacaaatcagacggcagcactgtctctgtgcccatgatggctcagaccaacaagttcaactatactgagttcaccacgcccgatggccattactacgacatcctggaactgccctaccacggggacaccctcagcatgttcattgctgccccttatgaaaaagaggtgcctctctctgccctcaccaacattctgagtgcccagctcatcagccactggaaaggcaacatgaccaggctgccccgcctcctggttctgcccaagttctccctggagactgaagtcgacctcaggaagcccctagagaacctgggaatgaccgacatgttcagacagtttcaggctgacttcacgagtctttcagaccaagagcctctccacgtcgcgcaggcgctgcagaaagtgaagatcgaggtgaacgagagtggcacggtggcctcctcatccacagctgtcatagtctcagcccgcatggcccccgaggagatcatcatggacagacccttcctctttgtggtccggcacaaccccacaggaacagtccttttcatgggccaagtgatggaaccctgaccctggggaaagacgccttcatctgggacaaaactggagatgcatcgggaaagaagaaactccgaagaaaagaattttagtgttaatgactctttctgaaggaagagaagacatttgccttttgttaaaagatggtaaaccagatctgtctccaagaccttggcctctccttggaggacctttaggtcaaactccctagtctccacctgagaccctgggagagaagtttgaagcacaactcccttaaggtctccaaaccagacggtgacgcctgcgggaccatctggggcacctgcttccacccgtctctctgcccactcgggtctgcagacctggttcccactgaggccctttgcaggatggaactacggggcttacaggagcttttgtgtgcctggtagaaactatttctgttccagtcacattgccatcactcttgtactgcctgccaccgcggaggaggctggtgacaggccaaaggccagtggaagaaacaccctttcatctcagagtccactgtggcactggccacccctccccagtacaggggtgctgcaggtggcagagtgaatgtcccccatcatgtggcccaactctcctggcctggccatctccctccccagaaacagtgtgcatgggttattttggagtgtaggtgacttgtttactcattgaagcagatttctgcttccttttatttttataggaatagaggaagaaatgtcagatgcgtgcccagctcttcaccccccaatctcttggtggggaggggtgtacctaaatatttatcatatccttgcccttgagtgcttgttagagagaaagagaactactaaggaaaataatattatttaaactcgctcctagtgtttctttgtggtctgtgtcaccgtatctcaggaagtccagccacttgactggcacacacccctccggacatccagcgtgacggagcccacactgccaccttgtggccgcctgagaccctcgcgccccccgcgccccccgcgcccctctttttccccttgatggaaattgaccatacaatttcatcctccttcaggggatcaaaaggacggagtggggggacagagactcagatgaggacagagtggtttccaatgtgttcaatagatttaggagcagaaatgcaaggggctgcatgacctaccaggacagaactttccccaattacagggtgactcacagccgcattggtgactcacttcaatgtgtcatttccggctgctgtgtgtgagcagtggacacgtgaggggggggtgggtgagagagacaggcagctcggattcaactaccttagataatatttctgaaaacctaccagccagagggtagggcacaaagatggatgtaatgcactttgggaggccaaggcgggaggattgcttgagcccaggagttcaagaccagcctgggcaacataccaagacccccgtctctttaaaaatatatatattttaaatatacttaaatatatatttctaatatctttaaatatatatatatattttaaagaccaatttatgggagaattgcacacagatgtgaaatgaatgtaatctaatagaagc

SEQ ID NO: 400 - DNA, 2566 bp, Homo sapiens
ggcacgagttgtgctcctcgcttgcctgttccttttccacgcattttccaggataactgtgactccaggcccgcaatggatgccctgcaactagcaaattcggcttttgccgttgatctgttcaaacaactatgtgaaaaggagccactgggcaatgtcctcttctctccaatctgtctctccacctctctgtcacttgctcaagtgggtgctaaaggtgacactgcaaatgaaattggacaggttcttcattttgaaaatgtcaaagatataccctttggatttcaaacagtaacatcggatgtaaacaaacttagttccttttactcactgaaactaatcaagcggctctacgtagacaaatctctgaatctttctacagagttcatcagctctacgaagagaccctatgcaaaggaattggaaactgttgacttcaaagataaattggaagaaacgaaaggtcagatcaacaactcaattaaggatctcacagatggccactttgagaacattttagctgacaacagtgtgaacgaccagaccaaaatccttgtggttaatgctgcctactttgttggcaagtggatgaagaaatttcctgaatcagaaacaaaagaatgtcctttcagactcaacaagacagacaccaaaccagtgcagatgatgaacatggaggccacgttctgtatgggaaacattgacagtatcaattgtaagatcatagagcttccttttcaaaataagcatctcagcatgttcatcctactacccaaggatgtggaggatgagtccacaggcttggagaagattgaaaaacaactcaactcagagtcactgtcacagtggactaatcccagcaccatggccaatgccaaggtcaaactctccattccaaaatttaaggtggaaaagatgattgatcccaaggcttgtctggaaaatctagggctgaaacatatcttcagtgaagacacatctgatttctctggaatgtcagagaccaagggagtggccctatcaaatgttatccacaaagtgtgcttagaaataactgaagatggtggggattccatagaggtgccaggagcacggatcctgcagcacaaggatgaattgaatgctgaccatccctttatttacatcatcaggcacaacaaaactcgaaacatcattttctttggcaaattctgttctccttaagtggcatagcccatgttaagtcctccctgacttttctgtggatgccgatttctgtaaactctgcatccagagattcattttctagatacaataaattgctaatgttgctggatcaggaagccgccagtacttgtcatatgtagccttcacacagatagacctttttttttttccaattctatcttttgtttccttttttcccataagacaatgacatacgcttttaatgaaaaggaatcacgttagaggaaaaatatttattcattatttgtcaaattgtccggggtagttggcagaaatacagtcttccacaaagaaaattcctataaggaagatttggaagctcttcttcccagcactatgctttccttctttgggatagagaatgttccagacattctcgcttccctgaaagactgaagaaagtgtagtgcatgggacccacgaaactgccctggctccagtgaaacttgggcacatgctcaggctactataggtccagaagtccttatgttaagccctggcaggcaggtgtttattaaaattctgaattttggggattttcaaaagataatattttacatacactgtatgttatagaacttcatggatcagatctggggcagcaacctataaatcaacaccttaatatgctgcaacaaaatgtagaatattcagacaaaatggatacataaagactaagtagcccataaggggtcaaaatttgctgccaaatgcgtatgccaccaacttacaaaaacacttcgttcgcagagcttttcagattgtggaatgttggataaggaattatagacctctagtagctgaaatgcaagaccccaagaggaagttcagatcttaatataaattcactttcatttttgatagctgtcccatctggtcatgtggttggcactagactggtggcaggggcttctagctgactcgcacagggattctcacaatagccgatatcagaatttgtgttgaaggaacttgtctcttcatctaatatgatagcgggaaaaggagaggaaactactgcctttagaaaatataagtaaagtgattaaagtgctcacgttaccttgacacatagtttttcagtctatgggtttagttactttagatggcaagcatgtaacttatattaatagtaatttgtaaagttgggtggataagctatccctgttgccggttcatggattacttctctataaaaaatatatatttaccaaaaaattttgtgacattccttctcccatctcttccttgacatgcattgtaaataggttcttcttgttctgagattcaatattgaatttctcctatgctattgacaataaaatattattgaactacc

SEQ ID NO: 401 - DNA, 428 bp, Homo sapiens
atgtctcttgtcagctgtctttcagaagacctggtggggcaagtccgtgggcatcatgttgaccgagctggagaaagccttgaactctatcatcgacgtctaccacaagtactccctgataaaggggaatttccatgccgtctacagggatgacctgaagaaattgctagagaccgagtgtcctcagtatatcaggaaaaagggtgcagacgtctggttcaaagagttggatatcaacactgatggtgcagttaacttccaggagttcctcattctggtgataaagatgggcgtggcagcccacaaaaaaagccatgaagaaagccacaaagagtagctgagttactgggcccagaggctgggcccctggacatgtacctgcagaataataaagtcatcaatacctcaaaaaaaaaaaaaaaaaaaaa

SEQ ID NO: 402 - DNA, 969 bp, Homo sapiens
agctttggggttgtccctggacttgtcttggttccagaacctgacgacccggcgacggcgacgtctcttttgactaaaagacagtgtccagtgctccagcctaggagtctacggggaccgcctcccgcgccgccaccatgcccaacttctctggcaactggaaaatcatccgatcggaaaacttcgaggaattgctcaaagtgctgggggtgaatgtgatgctgaggaagattgctgtggctgcagcgtccaagccagcagtggagatcaaacaggagggagacactttctacatcaaaacctccaccaccgtgcgcaccacagagattaacttcaaggttggggaggagtttgaggagcagactgtggatgggaggccctgtaagagcctggtgaaatgggagagtgagaataaaatggtctgtgagcagaagctcctgaagggagagggccccaagacctcgtggaccagagaactgaccaacgatggggaactgatcctgaccatgacggcggatgacgttgtgtgcaccagggtctacgtccgagagtgagtggccacaggtagaaccgcggccgaagcccaccactggccatgctcaccgccctgcttcactgccccctccgtcccaccccctccttctaggatagcgctccccttaccccagtcacttctgggggtcactgggatgcctcttgcagggtcttgctttctttgacctcttctctcctcccctacaccaacaaagaggaatggctgcaagagcccagatcacccattccgggttcactccccgcctccccaagtcagcagtcctagccccaaaccagcccagagcagggtctctctaaaggggacttgagggcctgagcaggaaagactggccctctagcttctaccctttgtccctgtagcctatacagtttagaatatttatttgttaattttattaaaatgctttaaaaaaa

SEQ ID NO: 403 - DNA, 3354 bp, Homo sapiens
ctgggtcctgtgtgtgccacaggggtggggtgtccagcgagcggtctcctcctcctgctagtgctgctgcggcgtcccgcggcctccccgagtcgggcgggaggggagagcgggtgtggatttgtcttgacggtaattgttgcgtttccacgtctcggaggcctgcgcgctgggttgctccttcttcgggagcgagctgttctcagcgatcccactcccagccggggctccccacacacactgggctgcgtgcgtgtggagtgggacccgcgcacacgcgtgtctctggacagctacggcgccgaaagaactaaaattccagatggcaaactcaatgaatggcagaaaccctggtggtcgaggaggaaatccccgaaaaggtcgaattttgggtattattgatgctattcaggatgcagttggaccccctaagcaagctgccgcagatcgcaggaccgtggagaagacttggaagctcatggacaaagtggtaagactgtgccaaaatcccaaacttcagttgaaaaatagcccaccatatatacttgatattttgcctgatacatatcagcatttacgacttatattgagtaaatatgatgacaaccagaaacttgcccaactcagtgagaatgagtactttaaaatctacattgatagccttatgaaaaagtcaaaacgggcaataagactctttaaagaaggcaaggagagaatgtatgaagaacagtcacaggacagacgaaatctcacaaaactgtcccttatcttcagtcacatgctggcagaaatcaaagcaatctttcccaatggtcaattccagggagataactttcgtatcacaaaagcagatgctgctgaattctggagaaagttttttggagacaaaactatcgtaccatggaaagtattcagacagtgccttcatgaggtccaccagattagctctagcctggaagcaatggctctaaaatcaacaattgatttaacttgcaatgattacatttcagtttttgaatttgatatttttaccaggctgtttcagccttggggctctattttgcggaattggaatttcttagctgtgacacatccaggttacatggcatttctcacatatgatgaagttaaagcacgactacagaaatatagcaccaaacccggaagctatattttccggttaagttgcactcgattgggacagtgggccattggctatgtgactggggatgggaatatcttacagaccatacctcataacaagcccttatttcaagccctgattgatggcagcagggaaggattttatctttatcctgatgggaggagttataatcctgatttaactggattatgtgaacctacacctcatgaccatataaaagttacacaggaacaatatgaattatattgtgaaatgggctccacttttcagctctgtaagatttgtgcagagaatgacaaagatgtcaagattgagccttgtgggcatttgatgtgcacctcttgccttacggcatggcaggagtcggatggtcagggctgccctttctgtcgttgtgaaataaaaggaactgagcccataatcgtggacccctttgatccaagagatgaaggctccaggtgttgcagcatcattgacccctttggcatgccgatgctagacttggacgacgatgatgatcgtgaggagtccttgatgatgaatcggttggcaaacgtccgaaagtgcactgacaggcagaactcaccagtcacatcaccaggatcctctccccttgcccagagaagaaagccacagcctgacccactccagatcccacatctaagcctgccacccgtgcctcctcgcctggatctaattcagaaaggcatagttagatctccctgtggcagcccaacaggttcaccaaagtcttctccttgcatggtgagaaaacaagataaaccactcccagcaccacctcctcccttaagagatcctcctccaccgccacctgaaagacctccaccaatcccaccagacaatagactgagtagacacatccatcatgtggaaagcgtgccttccagagacccgccaatgcctcttgaagcatggtgccctcgggatgtgtttgggactaatcagcttgtgggatgtcgactcctaggggagggctctccaaaacctggaatcacagcgagttcaaatgtcaatggaaggcacagtagagtgggctctgacccagtgcttatgcggaaacacagacgccatgatttgcctttagaaggagctaaggtcttttccaatggtcaccttggaagtgaagaatatgatgttcctccccggctttctcctcctcctccagttaccaccctcctccctagcataaagtgtactggtccgttagcaaattctctttcagagaaaacaagagacccagtagaggaagatgatgatgaatacaagattccttcatcccaccctgtttccctgaattcacaaccatctcattgtcataatgtaaaacctcctgttcggtcctgtgataatggtcactgtatgctgaatggaacacatggtccatcttcagagaagaaatcaaacatccctgacttaagcatatatttaaagggtacgtatagaatataatttcctttgtgatgtacatcttaatggtcagaatttaaaggcaaaatttcatgccattgtactgaaaatacattaaggttttgtgttatcctctaggagatgtttttgattcagcctctgatcccgtgccattaccacctgccaggcctccaactcgggacaatccaaagcatggttcttcactcaacaggacgccctctgattatgatcttctcatccctccattaggttgaaacctttaaaaaagttttgaacaacccacccctccttcttttaatttcagaattttcagaattcagagttcagtataacacagactcactgggttgtgaatttgcctgaaatttgaatgggttctccaggtgccggtgactcccaagttcacgagaccattactccatgtagatgattaaggtagtagtgtagtagttgggcatcagtcaggttttaagcaagttgttttgtccatactaaatgtagtctaaaaacacatgagagctttgtgctctagtagttttgaagtgatgacttgaagtgttgagattttctttaagtataataattcttaataaatatgaacttgcttttcttgcagcatgagcaccagttccacttacgctaattaaattatgcaaaattaaatagttgtatgtagagaactgataataaattctgttttattctaatcattacaactgtaacacattcaaaaaaaaaaa

SEQ ID NO: 404 - DNA, 3667 bp, Homo sapiens
cagaaaaaactcagggcaaggttggccttggctcataagaccttttcaaactttattgagtcaatggttctagagaaagagaacacccatgaacgttccccaagttctcccaagggcgagaaggggaagagcaggctgcgccagggttcctggcgggcgtttctgaaaagcaaagatgccggaagccccaaaaagcccaccctagtgagtctgcctctaggacccgaagttctctccccagcagagactgacagccactgtgaggaacgggcggaggacaaagagggctatgtttttagcgatcactgggcaccgccacttgcctccacacctttgtcctccagtttagtttctccagaacacaggaggaaaagtgaaccgaccatcaagtgcacagccacccaggaaggcgacgctaaaccaagatgagcagaaggaagagagcagggaaggaggccagggtccgcgcggcttgggcacagtgccctggctcagggaccttcctgggagtgagaaccacatgccctgggaagaaccagcaggtgagaagcccagttgctctcacagtcagaaggcgttccacatggagcctgcccagaagccctgcttcaccactgacatggtgacatgggccctcctctgcatctctgcagagactgtgcgtggggaggctccttcacagcctaggggcatccctcaccgctcgcccgtcagtgtggatgacctgtggctggagaagacacagagaaagaagttgcagaagcaggcccacgtcgaaaggaggctgcacataggggcagtgcacaaagatggagtcaagtgctggagaaagacgatcattacctctccagagtctttgaatctccctagaagaagccatccactctcccagagtgctccaacgggactgaaccacatgggctggccagagcacacaccaggcactgccatgcctgatggagctctggacacagctgtctgcgctgacgaagtggggagcgaggaggacctgtatgatgacctgcacagctccagccaccactacagccaccctggagggggtggggagcagctggctatcaatgagctcatcagcgatggcagtgtggtctgcgctgaagcactctgggaccatgtcaccatggacgaccaggagctgggcttcaaagctggggacgtcatcgaagtgatggatgccaccaacagagagtggtggtggggccgggtcgccgatggcgagggctggtttccagccagcttcgttcggctgagggtgaatcaggacgagcccgcggatgacgacgcccctctggccgggaacagcggagcggaggacggcggggcggaggcgcagagcagcaaggaccagatgcggaccaacgtcatcaacgagatcctcagcactgagcgggactacatcaagcacctgcgcgacatctgcgagggctacgtccggcagtgccgcaagcgcgcagacatgttcagcgaggagcagctgcgtaccatcttcgggaacatcgaggacatctaccgctgccagaaggccttcgtgaaggccctggagcagaggttcaaccgcgagcgcccacacctgagcgagctgggtgcctgcttcctggagcatcaagccgacttccagatctactcggagtactgcaataaccaccccaacgcctgcgtggagctctcccggctcaccaagctcagcaagtacgtgtacttcttcgaggcctgccggctgctgcagaagatgattgacatctccctggatggcttcctgctgactccggtgcagaagatctgcaagtaccctctgcagctggccgagctgctcaaatacacgcacccccagcacagggacttcaaggatgttgaagccgccttgcatgccatgaagaacgtggcccagctcatcaacgagcggaagcggagacttgagaacatcgacaagattgctcagtggcagagctccatagaggactgggagggagaagatctcttggtcaggagctcagaactcatctactcgggggagctgactcgagttacacagcctcaagccaaaagccagcagcgaatgttctttctctttgaccaccagctcatctactgtaagaaggacctgctccgccgcgacgtgttgtactacaagggccggctggacatggacggcctggaggtggtggacctggaggacgggaaggacagagacctccatgtgagcatcaagaacgccttccggctgcaccgtggcgccacaggggacagccacctgctgtgcaccaggaagcccgagcagaagcagcgctggctcaaggcctttgccagggagagggagcaggtgcagctggaccaggagacaggcttctccatcactgaactgcagaggaagcaggccatgctgaatgccagcaagcagcaggtcacagggaagcccaaagctgttggccggccctgctacctgacgcgccagaagcacccagccctgcccagcaaccggccccagcagcaggtcctggtgctggcggagcccaggcgcaagccatctaccttctggcacagcatcagccggctggcacccttccgcaagtgaactggtccctgcctgacagcacctgctgggccttcctgccagtggcccccagtttttcttccccgaggcccactcggcctggccttcctctgcctgcaagtgagcagggatgggctggggagttgcttgtgccaccaagacgtgccaggtctgtactcctgttgtctttttccctgctcctggtgccctgaagagaccagcaagggggcagaccccgcactcgccacaccgccgctgcagcttgggccccatccgccctctggacctgtgtagggcctcactgctggagcggggaaaccgcagctcagcccaggcccagctggggagaaggcgctacctgcgtgggaccctcttctctggaaacctaatcctcctttcatttcctctgggcaggactctctggccttctgtggcctgcaatgccaggccatgtgcccctctgccctctagttctccaagtccccagcccggccagtggtgccaggcagcttgccacttgggagggcagaagccaggaattccacacccttgtgttgcgcccggagcccgcccttcgcctcccagcccctcaagacaccgctggctgctggacaccctcttcacttgtgtgtgtgtgtgtagcggaaaaggacaagacggtgcagtcggctgcatactcccagtcgggagtgtggtcagtctgcctgctgctgtgcggtagctccagaaccacctcgttcctggttttgtttggattttggcatcttgtttttctaacaacaaacaatggagaaaaagaattgattcttagtgacacagaagattgccttacgctcgtgagcgtgagaagccataagagagagaccgaattctgtggctcagcacacaggactgacccacagcccaggcagcgggtgtgtggagatggcgccctgtcctgccaaggggcgccaggagcagagccagggcctggcgagctggcgtggagcccacaggattcagcagcatggacagtcactcttgcactattccttctccaagccagaaaccacatttaatttcataaataaatttatgaaaagtaacctggctgct

SEQ ID NO: 405 - DNA, 4258 bp, Homo sapiens
cagaaaaaactcagggcaaggttggccttggctcataagaccttttcaaactttattgagtcaatggttctagagaaagagaacacccatgaacgttccccaagttctcccaagggcgagaaggggaagagcaggctgcgccagggttcctggcgggcgtttctgaaaagcaaagatgccggaagccccaaaaagcccaccctagtgagtctgcctctaggacccgaagttctctccccagcagagactgacagccactgtgaggaacgggcggaggacaaagagggctatgtttttagcgatcactgggcaccgccacttgcctccacacctttgtcctccagtttagtttctccagaacacaggaggaaaagtgaaccgaccatcaagtgcacagccacccaggaaggcgacgctaaaccaagatgagcagaaggaagagagcagggaaggaggccagggtccgcgcggcttgggcacagtgccctggctcagggaccttcctgggagtgagaaccacatgccctgggaagaaccagcaggtgagaagcccagttgctctcacagtcagaaggcgttccacatggagcctgcccagaagccctgcttcaccactgacatggtgacatgggccctcctctgcatctctgcagagactgtgcgtggggaggctccttcacagcctaggggcatccctcaccgctcgcccgtcagtgtggatgacctgtggctggagaagacacagagaaagaagttgcagaagcaggcccacgtcgaaaggaggctgcacataggggcagtgcacaaagatggagtcaagtgctggagaaagacgatcattacctctccagagtctttgaatctccctagaagaagccatccactctcccagagtgctccaacgggactgaaccacatgggctggccagagcacacaccaggcactgccatgcctgatggagctctggacacagctgtctgcgctgacgaagtggggagcgaggaggacctgtatgatgacctgcacagctccagccaccactacagccaccctggagggggtggggagcagctggctatcaatgagctcatcagcgatggcagtgtggtctgcgctgaagcactctgggaccatgtcaccatggacgaccaggagctgggcttcaaagctggggacgtcatcgaagtgatggatgccaccaacagagagtggtggtggggccgggtcgccgatggcgagggctggtttccagccagcttcgttcggctgagggtgaatcaggacgagcccgcggatgacgacgcccctctggccgggaacagcggagcggaggacggcggggcggaggcgcagagcagcaaggaccagatgcggaccaacgtcatcaacgagatcctcagcactgagcgggactacatcaagcacctgcgcgacatctgcgagggctacgtccggcagtgccgcaagcgcgcagacatgttcagcgaggagcagctgcgtaccatcttcgggaacatcgaggacatctaccgctgccagaaggccttcgtgaaggccctggagcagaggttcaaccgcgagcgcccacacctgagcgagctgggtgcctgcttcctggagcatcaagccgacttccagatctactcggagtactgcaataaccaccccaacgcctgcgtggagctctcccggctcaccaagctcagcaagtacgtgtacttcttcgaggcctgccggctgctgcagaagatgattgacatctccctggatggcttcctgctgactccggtgcagaagatctgcaagtaccctctgcagctggccgagctgctcaaatacacgcacccccagcacagggacttcaaggatgttgaagccgccttgcatgccatgaagaacgtggcccagctcatcaacgagcggaagcggagacttgagaacatcgacaagattgctcagtggcagagctccatagaggactgggagggagaagatctcttggtcaggagctcagaactcatctactcgggggagctgactcgagttacacagcctcaagccaaaagccagcagcgaatgttctttctctttgaccaccagctcatctactgtaagaaggacctgctccgccgcgacgtgttgtactacaagggccggctggacatggacggcctggaggtggtggacctggaggacgggaaggacagagacctccatgtgagcatcaagaacgccttccggctgcaccgtggcgccacaggggacagccacctgctgtgcaccaggaagcccgagcagaagcagcgctggctcaaggcctttgccagggagagggagcaggtgcagctggaccaggagacaggcttctccatcactgaactgcagaggaagcaggccatgctgaatgccagcaagcagcaggtcacagggaagcccaaaggtaggcggacagcagccccacctcctcggctgcccggtccttaccctgctgacatcattcccttctctgaaccacaaagccaagccagctagccaccaggcctgaggggggcccactgccctttgcagctgtttgttcccaaaggttggtaataaggggccactggggaagcctgggtcagtatatggttgacattcttactctcaacaccttggctcccccagatcagggccattggtgacaatgcttgtttccccagggttccttcctgacaggcatctggggttggtgtagggatggagctgctttccccatttctacagagagccatgcccctgaaacatcacatgcctttgcacaggccacccccctcttcaggctgctgcaggaggccaggcccaggccagagaccccaggcagcctgagctcttggatgtggtcagctctccaggagcaagtcctgtgtggcaaaactgcctcctacggcggctctgaagcagagccctgggacggaccccatgctgtccccaacagctggggtggcactctgccctgggcacccatgaccctctgctgtctctccctgttcagctgttggccggccctgctacctgacgcgccagaagcacccagccctgcccagcaaccggccccagcagcaggtcctggtgctggcggagcccaggcgcaagccatctaccttctggcacagcatcagccggctggcacccttccgcaagtgaactggtccctgcctgacagcacctgctgggccttcctgccagtggcccccagtttttcttccccgaggcccactcggcctggccttcctctgcctgcaagtgagcagggatgggctggggagttgcttgtgccaccaagacgtgccaggtctgtactcctgttgtctttttccctgctcctggtgccctgaagagaccagcaagggggcagaccccgcactcgccacaccgccgctgcagcttgggccccatccgccctctggacctgtgtagggcctcactgctggagcggggaaaccgcagctcagcccaggcccagctggggagaaggcgctacctgcgtgggaccctcttctctggaaacctaatcctcctttcatttcctctgggcaggactctctggccttctgtggcctgcaatgccaggccatgtgcccctctgccctctagttctccaagtccccagcccggccagtggtgccaggcagcttgccacttgggagggcagaagccaggaattccacacccttgtgttgcgcccggagcccgcccttcgcctcccagcccctcaagacaccgctggctgctggacaccctcttcacttgtgtgtgtgtgtgtagcggaaaaggacaagacggtgcagtcggctgcatactcccagtcgggagtgtggtcagtctgcctgctgctgtgcggtagctccagaaccacctcgttcctggttttgtttggattttggcatcttgtttttctaacaacaaacaatggagaaaaagaattgattcttagtgacacagaagattgccttacgctcgtgagcgtgagaagccataagagagagaccgaattctgtggctcagcacacaggactgacccacagcccaggcagcgggtgtgtggagatggcgccctgtcctgccaaggggcgccaggagcagagccagggcctggcgagctggcgtggagcccacaggattcagcagcatggacagtcactcttgcactattccttctccaagccagaaaccacatttaatttcataaataaatttatgaaaagtaacctggctgct

SEQ ID NO: 406 - DNA, 481 bp, Homo sapiens
ggcacgaggcagagacggaaccagagacaggccagagcatccccctcctccaccatgaaactcgctgtcaccctcaccctggtcacactggctctctgctgcagctccgcttctgcagagatctgcccgagctttcagcgtgtcatcgaaaccctcctcatggacacaccctccagttatgaggctgccatggaacttttcagccctgatcaagacatgagggaggcaggggctcagctgaagaagctggtggacaccctcccccaaaagcccagagaaagcatcattaagctcatggaaaaaatagcccaaagctcactgtgtaattagcatttagaagctgaagatccccaactgctccagcctctgccgctgccatgctttgagtccacgcccaccagccttgctctcttcaataaaccacaagcatctcaaaaaaaaaaaaaaaaaaaaaaaaaaaaaaaaaaaaaaaaaaaaaaaa

SEQ ID NO: 407 - DNA, 2676 bp, Homo sapiens
gtggacacacaagagttaactggcgggtgtgacaggcggaccgccctcaggaagtgttactcactggggatgtgcgtgccttgccttgggactggattctcttcctgaagcgaaggggctcccagccatggaaagccctggagagtcaggcgcgggctctcctggagcccccagcccgtccagcttcactactgggcacctggcgagagaaaagccagcccaggacccactgtatgacgtgcccaatgccagcggcgggcaggcaggcgggccgcagcggccggggcgcgttgtgagcctgcgggagcgcctgctgctcacccggcccgtgtggctgcagctgcaagccaacgcagcggccgcactgcacatgctgaggaccgagcccccggggacgttcctcgtgcggaaatctaacacccgccagtgccaggccctgtgcatgcggttgcctgaagccagtggcccctccttcgtctccagccactacatcctggagagccctggcggcgtctccttggagggctcggagctcatgttcccagacctagtccagctcatctgtgcctactgccacacccgggacatccttctcctcccgctgcagctccccagagccatccaccacgcagccactcacaaagagctggaggccatctcccatctgggcattgagttctggagctcctccctcaacatcaaggctcagcggggcccggctggaggcccagtgttgccccagctgaaggcccggtcccctcaagagctggaccagggcaccggagccgccttgtgcttcttcaaccccctgttcccgggggacctagggcccaccaagcgggagaaattcaagagaagcttcaaagtgcgcgtgtccacagagacctccagccccctgtctccacctgccgtgccacctccccccgtccccgtgctgccaggggcagtccccagccagacagagcggctgcccccttgccagctgctacggagggagagctcagtggggtaccgcgtgccagcaggcagtggccctagccttccgcctatgccctccctccaagaggtggactgcggctcccccagcagctccgaggaggagggggtgccagggtcccgggggagcccagcgacctcaccccacctgggccgccgacgacctctgcttcggtccatgagcgccgccttctgctccctactggcaccggagcggcaggtgggccgggctgcggcagcactgatgcaggaccgacacacagccgcgggccagctggtgcaggacctactgacccaggtgcgggatgggcagaggccccaggagctcgagggcatccgtcaggcgctgagccgggcccgggccatgctgagtgcggagctgggccctgagaagctcgtgtcgcctaagaggctggaacatgtcctggagaagtcattgcattgctctgtgctcaagcctctccggcccatcctggcagcccgcctgcggcgccggcttgccgcagacggctccctgggccgcctagctgagggcctccgcctggcccgggcccagggccccggagccttcgggtcccacctgagcctgccctccccagtagagttggagcaagtgcgccagaagctgctgcagctcgtccgcacctactcacccagcgcccaggtcaagcggctcctgcaggcctgcaagctgctctacatggccctgaggacccaggaaggggagggctcgggtgccgacgggttcctgcctctgctgagcctcgtcttggcccactgtgaccttcctgagctgctgctggaggccgagtacatgtcggagctgctggagcccagcctgcttactggagagggtggctactacctgaccagcctctctgccagcctggccctgctgagtggcctgggtcaggcccacaccctcccactgagccccgtgcaggagctacggcgctccctcagcctctgggagcagcgccgcctgcctgccacccactgcttccagcacctcctccgagtagcctatcaggatcccagcagtggctgcacctccaagaccctggccgtgcccccagaggcctcgattgccaccctgaaccagctctgtgccaccaagttccgagtgacccagcccaacacttttggcctcttcctgtacaaggagcagggctaccaccgcctgccccctggggccctggcccacaggctgcccaccactggctacctcgtctaccgccgggcagagtggcctgagacccagggggctgtgacagaggaggagggcagtgggcagtcagaggcaagaagcagaggggaggagcaagggtgccagggagatggggatgctggggtcaaagccagccccagggacattcgggaacagtctgagacaactgctgaagggggccagggtcaagcccaggaaggccctgctcagccaggggaaccagaggcagagggaagccgggcagcagaggagtagcttgaagtggccagaagggtcattcggggcgggagaccctgagcctgctgagaaatccttttagcgccagcaagccccacccagggccctgtcctgtgtctgccaccacctttgtctgatacttgtttccagggaagctgggggaactgccacatctgaggaactggaataaagatgaggggccttcgggggccaat

SEQ ID NO: 408 - DNA, 2076 bp, Homo sapiens
cggggaaggggagggaggagggggacgagggctctggcgggtttggaggggctgaacatcgcggggtgttctggtgtcccccgccccgcctctccaaaaagctacaccgacgcggaccgcggcggcgtcctccctcgccctcgcttcacctcgcgggctccgaatgcggggagctcggatgtccggtttcctgtgaggcttttacctgacacccgccgcctttccccggcactggctgggagggcgccctgcaaagttgggaacgcggagccccggacccgctcccgccgcctccggctcgcccagggggggtcgccgggaggagcccgggggagagggaccaggaggggcccgcggcctcgcaggggcgcccgcgcccccacccctgcccccgccagcggaccggtcccccacccccggtccttccaccatgcacttgctgggcttcttctctgtggcgtgttctctgctcgccgctgcgctgctcccgggtcctcgcgaggcgcccgccgccgccgccgccttcgagtccggactcgacctctcggacgcggagcccgacgcgggcgaggccacggcttatgcaagcaaagatctggaggagcagttacggtctgtgtccagtgtagatgaactcatgactgtactctacccagaatattggaaaatgtacaagtgtcagctaaggaaaggaggctggcaacataacagagaacaggccaacctcaactcaaggacagaagagactataaaatttgctgcagcacattataatacagagatcttgaaaagtattgataatgagtggagaaagactcaatgcatgccacgggaggtgtgtatagatgtggggaaggagtttggagtcgcgacaaacaccttctttaaacctccatgtgtgtccgtctacagatgtgggggttgctgcaatagtgaggggctgcagtgcatgaacaccagcacgagctacctcagcaagacgttatttgaaattacagtgcctctctctcaaggccccaaaccagtaacaatcagttttgccaatcacacttcctgccgatgcatgtctaaactggatgtttacagacaagttcattccattattagacgttccctgccagcaacactaccacagtgtcaggcagcgaacaagacctgccccaccaattacatgtggaataatcacatctgcagatgcctggctcaggaagattttatgttttcctcggatgctggagatgactcaacagatggattccatgacatctgtggaccaaacaaggagctggatgaagagacctgtcagtgtgtctgcagagcggggcttcggcctgccagctgtggaccccacaaagaactagacagaaactcatgccagtgtgtctgtaaaaacaaactcttccccagccaatgtggggccaaccgagaatttgatgaaaacacatgccagtgtgtatgtaaaagaacctgccccagaaatcaacccctaaatcctggaaaatgtgcctgtgaatgtacagaaagtccacagaaatgcttgttaaaaggaaagaagttccaccaccaaacatgcagctgttacagacggccatgtacgaaccgccagaaggcttgtgagccaggattttcatatagtgaagaagtgtgtcgttgtgtcccttcatattggaaaagaccacaaatgagctaagattgtactgttttccagttcatcgattttctattatggaaaactgtgttgccacagtagaactgtctgtgaacagagagacccttgtgggtccatgctaacaaagacaaaagtctgtctttcctgaaccatgtggataactttacagaaatggactggagctcatctgcaaaaggcctcttgtaaagactggttttctgccaatgaccaaacagccaagattttcctcttgtgatttctttaaaagaatgactatataatttatttccactaaaaatattgtttctgcattcatttttatagcaacaacaattggtaaaactcactgtgatcaatatttttatatcatgcaaaatatgtttaaaataaaatgaaaattgtattat

SEQ ID NO: 409 - DNA, 793 bp, Homo sapiens
atgcaggccatcaagtgtgtggtggtgggagatggggccgtgggcaagacctgccttctcatcagctacaccaccaacgcctttcccggagagtacatccccaccgtgtttgacaactattcagccaatgtgatggtggacagcaagccagtgaacctggggctgtgggacactgctgggcaggaggactacgaccgtctccggccgctctcctatccacagacggacgtcttcctcatctgcttctccctcgtcagcccagcctcttatgagaacgtccgcgccaagtggttcccagaagtgcggcaccactgccccagcacacccatcatcctggtgggcaccaagctggacctgcgggacgacaaggacaccatcgagaaactgaaggagaagaagctggctcccatcacctacccgcagggcctggcactggccaaggagattgactcggtgaaatacctggagtgctcagccctcacccagagaggcctgaaaaccgtgttcgacgaggccatccgggccgtgctgtgccctcagcccacgcggcagcagaagcgcgcctgcagcctcctctaggggttgcaccccagcgctcccacctagatgggtctgatccgccgccgccccaggcccgcgggctgctgacagagatacgcgccgtggtgcgcacggagcccttcacgggacgctacagcctgtgccgggccgggagctgggcagggggaaattagcagtggtgagaaaatgtataaagatagattctgggaaagaatttgctgcaaagttcatg

SEQ ID NO: 410 - DNA, 1851 bp, Homo sapiens
gggcgcgccagagacgcagccgcgctcccaccacccacacccaccgcgccctcgttcgcctcttctccgggagccagtccgcgccaccgccgccgcccaggccatcgccaccctccgcagccatgtccaccaggtccgtgtcctcgtcctcctaccgcaggatgttcggcggcccgggcaccgcgagccggccgagctccagccggagctacgtgactacgtccacccgcacctacagcctgggcagcgcgctgcgccccagcaccagccgcagcctctacgcctcgtccccgggcggcgtgtatgccacgcgctcctctgccgtgcgcctgcggagcagcgtgcccggggtgcggctcctgcaggactcggtggacttctcgctggccgacgccatcaacaccgagttcaagaacacccgcaccaacgagaaggtggagctgcaggagctgaatgaccgcttcgccaactacatcgacaaggtgcgcttcctggagcagcagaataagatcctgctggccgagctcgagcagctcaagggccaaggcaagtcgcgcctaggggacctctacgaggaggagatgcgggagctgcgccggcaggtggaccagctaaccaacgacaaagcccgcgtcgaggtggagcgcgacaacctggccgaggacatcatgcgcctccgggagaaattgcaggaggagatgcttcagagagaggaagccgaaaacaccctgcaatctttcagacaggatgttgacaatgcgtctctggcacgtcttgaccttgaacgcaaagtggaatctttgcaagaagagattgcctttttgaagaaactccacgaagaggaaatccaggagctgcaggctcagattcaggaacagcatgtccaaatcgatgtggatgtttccaagcctgacctcacggctgccctgcgtgacgtacgtcagcaatatgaaagtgtggctgccaagaacctgcaggaggcagaagaatggtacaaatccaagtttgctgacctctctgaggctgccaaccggaacaatgacgccctgcgccaggcaaagcaggagtccactgagtaccggagacaggtgcagtccctcacctgtgaagtggatgcccttaaaggaaccaatgagtccctggaacgccagatgcgtgaaatggaagagaactttgccgttgaagctgctaactaccaagacactattggccgcctgcaggatgagattcagaatatgaaggaggaaatggctcgtcaccttcgtgaataccaagacctgctcaatgttaagatggcccttgacattgagattgccacctacaggaagctgctggaaggcgaggagagcaggatttctctgcctcttccaaacttttcctccctgaacctgagggaaactaatctggattcactccctctggttgatacccactcaaaaaggacattcctgattaagacggttgaaactagagatggacaggttatcaacgaaacttctcagcatcacgatgaccttgaataaaaattgcacacactcagtggcaggcgatatattacccaggcaagaataaaaaagaaatcccatatcttaaagaaacagctttcaagtgcctttctgcagtttttcaggagcgcaagatagatttggaataggaataagctctagttcttaacaaccgacactcctacaagatttagaaaaaagtttacaacataatctagtttacagaaaaatcttgtgctagaatactttttaaaaggtattttgaataccattaaaactgcttttttttttccagcaagtatccaaccaacttggttctgcttcaataaatctttggaaaactcca

SEQ ID NO: 411 - DNA, 1018 bp, Homo sapiens
ggcacgaggctcaagattcacagcatctcagacgcagcctaggttcccatggacttgtcataagacaaaagaggacagctgtgctgagggggcagggtctgcagcctcctggctgtgccaggaccacacctaccaaggccgcaccaggatgtcggacaccgaggagcaggaatatgaggaggagcagccggaagaggaggctgcggaggaggaggaggaagaagaggaacgccccaaaccaagccgccccgtggtgcctcctttgatcccgccaaagatcccagaaggggagcgcgttgacttcgatgacatccaccgcaagcgcatggagaaagacctgctggagctgcagacactcatcgatgtacatttcgagcagcggaagaaggaggaagaggagctggttgccttgaaggagcgcattgagcggcgccggtcagagagagccgagcaacagcgcttcagaactgagaaggaacgcgaacgtcaggctaagctggcggaggagaagatgaggaaggaagaggaagaggccaagaagcgggcagaggatgatgccaagaaaaagaaggtgctgtccaacatgggggcccattttggcggctacctggtcaaggcagaacagaagcgtggtaagcggcagacggggcgggagatgaaggtgcgcatcctctccgagcgtaagaagcctctggacattgactacatgggggaggaacagctccgggagaaagcccaggagctgtcggactggatccaccagctggagtctgagaagttcgacctgatggcgaagctgaaacagcagaaatatgagatcaacgtgctgtacaaccgcatcagccacgcccagaagttccggaagggggcagggaagggccgcgttggaggccgctggaagtgaggatgccgccccggacagtggcacctgggaagcctgggagtgtttgtcccatcggtagcttgaaataaacgctcccctcagacactcaaaaaaaaaaaaaaaaaaaaaaaaaaa

SEQ ID NO: 412 - DNA, 1758 bp, Homo sapiens
atgtcccagcaacacacactgccagtgaccctctcccctgccctcagtcaggagctcctcaagactgttcctcctccagtcaatacccatcaggagcaaatgaaacagccaactccactgcctcccccatgccagaaggtgcctgtcgagctcccagtggaggtcccatcaaagcaagaggaaaagcacatgactgctgtaaagggactgcctgagcaagaatgtgagcaacagcagaaggagccacaggagcaggagctgcagcaacagcactgggaacagcatgaggaatatcagaaagcagaaaacccagagcagcagcttaagcaggagaaaacacaaagggatcagcagctaaacaaacagctggaagaagagaagaagctcttagaccagcaactggatcaagagctagtcaagagagatgagcaactgggaatgaagaaagagcaactgttggagctcccagagcagcaggaggggcacctgaagcacctagagcagcaggagggacagctgaagcacccggagcagcaggaggggcagctggagctcccagagcagcaggaggggcagctggagctcccagagcagcaggaggggcagctggagctcccagagcagcaggaggggcagctggagctcccagagcagcaggaggggcagctggagctcccacagcagcaggaggggcagctggagctctctgagcagcaggaggggcagctggagctctctgagcagcaggaggggcagctggagctctctgagcagcaggagggacagctgaagcacctggagcaccaggaggggcagctggaggtcccagaggagcagatggggcagctgaagtacctggaacagcaggaggggcagctgaagcacctggatcagcaggagaagcagccagagctcccagagcagcagatggggcagctgaagcacctggagcagcaggaggggcagcctaagcatctggagcagcaggaggggcaactggagcagctggaggagcaggaggggcagctgaagcacctggagcagcaggaggggcagctggagcacctggagcaccaggaagggcagctggggctcccagagcagcaggtgctgcagctgaagcagctagagaagcagcaggggcagccaaagcacctggaggaggaggaggggcagctgaagcacctggtgcagcaggaggggcagctgaagcatctggtgcagcaggaggggcagctggagcagcaggagaggcaggtggagcacctggagcagcaggtggggcagctgaagcacctagaggagcaggagggacagctgaagcatctggagcagcagcaggggcagttggaggtcccagagcagcaggtggggcagccaaagaacctggagcaggaggagaagcaactggagctcccagagcagcaagagggccaggtgaagcacctggagaagcaggaggcacagctggagctcccagagcagcaggtaggacagccaaagcacctggaacagcaggaaaagcacctagagcacccagagcagcaggacggacaactaaaacatctggagcagcaggaggggcagctgaaggacctggagcagcagaaggggcagctggagcagcctgtgtttgccccagctccaggccaggtccaagacattcaaccagccctgcccacaaagggagaagtattgcttcctgtagagcaccagcagcagaagcaggaggtgcagtggccacccaaacataaataa

SEQ ID NO: 413 - DNA, 1633 bp, Homo sapiens
cagaatctccggcagtttttgtacctcaagaagtaagtggaacacctttccctgtcatagttattttcatccagacatctggtggaagcatcagattccttacagatataagagaggcatcatttaaaaggtagaacaggatcgacaaacaaggatttatgtcaggatctctcagcctctgtgttaccgagggcatttctaacagtcttcttactacggcctccgccgaccgcgcgctcgccccgccgctcctgctgcagccccagggcccctcgccgccgccaccatggacgccatcaagaagaagatgcagatgctgaagctcgacaaggagaacgccttggatcgagctgagcaggcggaggccgacaagaaggcggcggaagacaggagcaagcagctggaagatgagctggtgtcactgcaaaagaaactcaagggcaccgaagatgaactggacaaatactctgaggctctcaaagatgcccaggagaagctggagctggcagagaaaaaggccaccgatgctgaagccgacgtagcttctctgaacagacgcatccagctggttgaggaagagttggatcgtgcccaggagcgtctggcaacagctttgcagaagctggaggaagctgagaaggcagcagatgagagtgagagaggcatgaaagtcattgagagtcgagcccaaaaagatgaagaaaaaatggaaattcaggagatccaactgaaagaggcaaagcacattgctgaagatgccgaccgcaaatatgaagaggtggcccgtaagctggtcatcattgagagcgacctggaacgtgcagaggagcgggctgagctctcagaaggccaagtccgacagctggaagaacaattaagaataatggatcagaccttgaaagcattaatggctgcagaggataagtactcgcagaaggaagacagatatgaggaagagatcaaggtcctttccgacaagctgaaggaggctgagactcgggctgagtttgcggagaggtcagtaactaaattggagaaaagcattgatgacttagaagagaaagtggctcatgccaaagaagaaaaccttagtatgcatcagatgctggatcagactttactggagttaaacaacatgtgaaaacctccttagctgcgaccacattctttcattttgttttgttttgttttgtttttaaacacctgcttaccccttaaatgcaatttatttacttttaccactgtcacagaaacatccacaagataccagctaggtcagggggtggggaaaacacatacaaaaagcaagcccatgtcagggcgatcctggttcaaatgtgccatttcccgggttgatgctgccacactttgtagagagtttagcaacacagtgtgcttagtcagcgtaggaatcctcactaaagcaggagaagttccattcaaagtgccaatgatagagtcaacaaggaaggttaatgttggaaacacaatcaggtgtggattggtgctactttgaacaaaaggtccccctgtggtcttttgttcaacattgtacaatgtagaactctgtccaacactaatttattttgtcttgagttttactacaagatgagactatggatcccgcatgcct

SEQ ID NO: 414 - DNA, 619 bp, Homo sapiens
agcagttctaagggaccatacagagtattcctctcttcacaccaggaccagccactgttgcagcatgagttcccagcagcagaagcagccctgcatcccaccccctcagcttcagcagcagcaggtgaaacagccttgccagcctccacctcaggaaccatgcatccccaaaaccaaggagccctgccaccccaaggtgcctgagccctgccaccccaaagtgcctgagccctgccagcccaagcttccagagccatgccaccccaaggtgcctgagccctgcccttcaatagtcactccagcaccagcccagcagaagaccaagcagaagtaatgtggtccacagccatgcccttgaggagccggccaccagatgctgaatcccctatcccattctgtgtatgagtcccatttgccttgcaattagcattctgtctcccccaaaaaagaatgtgctatgaagctttctttcctacacactctgagtctctgaatgaagctgaaggtcttagtaccagagctagttttcagctgctcagaattcatctgaagagagacttaagatgaaagcaaatgattcagctcccttatacccccattaaattcactttcaattcca

SEQ ID NO: 415 - DNA, 1709 bp, Homo sapiens
ggtacctcctgccagcacctcttgggtttgctgagaactcacgggctccagctacctggccatgaccaccacatttctgcaaacttcttcctccacctttgggggtggctcaacccgagggggttccctcctggctgggggaggtggctttggtggggggagtctctctgggggaggtggaagccgaagtatctcagcttcttctgctaggtttgtctcttcagggtcaggaggaggatatgggggtggcatgagggtctgtggctttggtggaggggctggtagtgttttcggtggaggctttggagggggcgttggtgggggttttggtggtggctttggtggtggcgatggtggtctcctctctggcaatgagaaaattaccatgcagaacctcaatgaccgcctggcctcctacctggacaaggtacgtgccctggaggaggccaatgctgacctggaggtgaagatccatgactggtaccagaagcagaccccagccagcccagaatgcgactacagccaatacttcaagaccattgaagagctccgggacaagatcatggccaccaccatcgacaactcccgggtcatcctggagatcgacaatgccaggctggctgcggacgacttcaggctcaagtatgagaatgagctggccctgcgccagggcgttgaggctgacatcaacggcttgcgccgagtcctggatgagctgaccctggccaggactgacctggagatgcagatcgagggcctgaatgaggagctagcctacctgaagaagaaccacgaagaggagatgaaggagttcagcagccagctggccggccaggtcaatgtggagatggacgcagcaccgggtgtggacctgacccgtgtgctggcagagatgagggagcagtacgaggccatggcggagaagaaccgccgggatgtcgaggcctggttcttcagcaagactgaggagctgaacaaagaggtggcctccaacacagaaatgatccagaccagcaagacggagatcacagacctgagacgcacgatgcaggagctggagatcgagctgcagtcccagctcagcatgaaagctgggctggagaactcactggccgagacagagtgccgctatgccacgcagctgcagcagatccaggggctcattggtggcctggaggcccagctgagtgagctccgatgcgagatggaggctcagaaccaggagtacaagatgctgcttgacataaagacacggctggagcaggagatcgctacttaccgcagcctgctcgagggccaggatgccaagatggctggcattggcatcagggaagcctcttcaggaggtggtggtagcagcagcaatttccacatcaatgtagaagagtcagtggatggacaggtggtttcttcccacaagagagaaatctaagtgtctattgcaggagaaacgtcccttgccactccccactctcatcaggccaagtggaggactggccagagggcctgcacatgcaaactccagtccctgccttcagagagctgaaaagggtccctcggtcttttatttcagggctttgcatgcgctctattccccctctgcctctccccaccttctttggagcaaggagatgcagctgtattgtgtaacaagctcatttgtacagtgtctgttcatgtaataaagaattacttttccttttgcaaat

SEQ ID NO: 416 - DNA, 6457 bp, Homo sapiens
gctgaccagccagtgaggacgcccgctgcctcccacctgccctcctgccgtctttcgccagccaagcccagcctgagccagcacttgcctttacgaccatgttcaaggggctgagcaaaggctcccaggggaaggggtcccccaagggctcccccgccaaggggtcccccaaaggctcccccagcaggcacagccgggctgccacccaggagctggcccttctcatctcccgcatgcaagccaacgccgaccaggtggagcgggacatcctggagacgcagaagaggctgcagcaggaccggctgaacagtgagcagagccaggccctgcagcaccagcaggagacgggccgcagcctgaaggaggctgaggtgctgctcaaggacctcttcctggacgtggacaaggcccggcggctcaagcacccgcaggctgaggagattgagaaggacatcaagcagctgcacgagcgggtgacccaggagtgtgcggagtaccgtgccctgtacgagaagatggtgctgccccccgacgtgggacccagggtcgactgggcacgcgtgctggagcagaaacagaagcaggtctgcgcaggccagtacgggccgggcatggcggagctggagcaacagatcgccgagcacaacatcctgcagaaggagatcgacgcctatgggcagcagctgcggagcctcgtggggccggatgcagccaccatccggagccaataccgagacctactgaaggcggcgtcgtggcgcgggcagagcctgggcagcctgtacacgcacctccagggctgcacgcggcagctgagcgccctggctgagcagcagcgccgcatcctgcagcaggactggagcgacctcatggccgaccctgcgggcgtgcggcgggagtacgagcacttcaagcagcacgagctgctgagccaggagcagagcgtgaaccagctggaggacgacggcgagcgcatggtggagctgcggcaccccgcggtggggcccatccaggcccaccaggaggccctgaagatggagtggcagaacttcctgaacctgtgtatctgccaggagacccagctgcagcacgtggaggactaccgccggttccaggaagaggccgactcagtcagccagaccctggcgaagctcaactccaacttggatgccaagtacagccctgcacctgggggcccccctggcgcccccacagagctgctgcaacagctggaggcagaggaaaaacggctggccgtcaccgagagggccactggggacctgcagcggcgaagccgggatgtggcccctctgccacagcgaagaaacccccctcagcagcccctgcacgtggacagcatctgcgactgggactcaggagaagtgcagctgctgcagggtgagcggtataagctggtagataacactgaaccgcacgcctgggtcgtgcagggccctggcggggagaccaagcgtgctcccgccgcctgcttctgcatcccagcaccagaccctgatgctgtggccagggcctcccggctggcctcagagctgcaggccctgaagcagaaattggccacagtccagagccgcctgaaggccagtgctgtggagtctcttcggcccagccagcaggctccatctggctcagacctggccaacccacaggcccagaagctcctgacacagatgacccggctggatggagacctgggacagatagagaggcaggtgctggcctgggcgcgggccccgctgagccgccccacacccttggaggacttggagggccgcatccacagccatgagggcacagcccagcgcctgcagagcctgggaacggagaaggagacagcccagaaggagtgcgaggcgtttctgtccacgcggcccgtgggccccgctgccctgcagctgcccgtagccctcaacagcgtgaagaacaagttcagtgacgtgcaggttctgtgcagcctctacggggagaaagccaaggctgccctggatctggagcggcagatccaggatgcggacagggtcatccgaggcttcgaggccaccctggtgcaggaggcccccatccctgctgaaccgggggctctgcaggagagggtcagcgagctgcagcgccagcggagggagctgctggaacagcagacctgcgtgctgcggctacaccgcgcgctgaaggcctcggagcacgcatgcgctgccctgcagaacaacttccaggagttctgccaagacctgcctcgccagcagcgccaggtgcgagccctcaccgaccgctaccacgccgtaggggaccagctggacctgcgggagaaggtggtgcaggatgccgccctcacctaccagcagttcaagaactgcaaggataacctgagctcctggctggagcacctgccccgcagccaggtgcggcccagcgacggccccagccagatcgcctacaagctgcaggcgcagaagaggctgacgcaggagatccagagccgagagcgggacagggccacagcatcccacctctcccaggccctgcaggcagcgctccaggactatgagctccaggcagacacctaccgctgctctttggagcccaccctggcagtgtcagcccccaagagaccccgagtggctcccctgcaagagagcatccaagcccaggagaagaaccttgcaaaggcctatactgaggttgcagcagcacagcagcagctgctccagcagctggagtttgctagaaaaatgctggagaagaaggagctcagtgaggacatccgaaggacccatgatgcaaagcagggctccgagagccctgcccaagcagggagagagtcagaggccctgaaggcccagctggaagaggagaggaagcgggtggcccgggtgcagcatgagctggaggcgcagaggagccaactgctgcagctgaggacccagcggcccttggagaggctggaggagaaggaagtggtagagttctaccgggacccccagctggagggcagcctgtccagggtgaaggcccaggtggaggaggagggcaagcggcgggctggcctgcaggcagacctggaagtggcagcccagaaggtcgtgcagctggaaagcaagaggaagaccatgcagcctcatctgctgaccaaggaggtcacccaggtggagagggaccccggcctggacagccaggcggcccagctcaggatccagatccagcagctccgcggggaggatgccgtcatctcggcccggctggaagggctgaagaaggagctactggcccttgagaagagggaggtggacgtgaaggagaaggtcgtggtgaaagaggtagtcaaggtggagaagaatctggaaatggtcaaggcagcccaggctctgaggctgcagatggaggaggatgctgcgcggaggaagcaggcggaggaggctgtggccaagctacaggctcgcatcgaagacctggagcgggctatcagctcggtggagcccaaggtcatcgtgaaggaggtgaagaaggtggagcaggacccagggctcctccaggagtcctccaggctgaggagcctcctcgaggaggagaggaccaagaacgcgacgctggccagggagctgagcgacctgcacagcaagtacagcgtggtggagaagcagaggcccaaagtgcagctccaggagcgcgtccacgagatcttccaggtggatccggagacagagcaggagatcactcggctcaaggccaagctgcaggagatggcgggcaagaggagcggtgtggagaaggaggtggagaagctgctgcccgacctggaggtcctgcgggcccagaagcccacggtggagtacaaggaggtgacccaggaggtggtgaggcatgagaggagccccgaggtgctgcgtgagatcgaccgcctgaaggctcagctcaacgagctcgtcaacagccacgggcgctcccaggagcagctcatccgcctgcagggtgagcgcgacgagtggaggcgcgagcgggccaaggtggagaccaagacggtgagcaaggaggtggtgcgccacgagaaggacccggtgctggagaaagaagcagagcggctccgccaggaggtgcgggaggcggcccagaagaggcgggccgcggaggacgcggtgtacgagctgcagagcaagcgcctgctgctggagaggaggaagcccgaggagaaggtggtggtgcaggaggtggtggtcacccagaaggacccgaagctgcgcgaggagcacagccggctgagcgggagcctggatgaggaggtgggccggcggcgccagctagagcttgaggtgcagcagctgcgggccggcgtggaggagcaggagggcctgctcagcttccaggaggaccgcagcaagaagctggccgtggagagggagctgcggcagctgaccttgaggatccaggagctcgagaagcggcctcccacggtgcaggagaagatcatcatggaggaagtggtcaagctggagaaggacccggacctggagaagtccacggaagccctgcggtgggacctggaccaggagaagacccaggtaaccgagctgaatcgggagtgcaagaacctgcaggtccagattgacgtcctccagaaagccaaatcgcaggagaagaccatctacaaggaagtgatccgggtgcagaaggaccgcgtcctggaagatgagcgggcccgcgtgtgggagatgctcaacagggagcgcacggcccggcaggcccgggaggaggaggcacggcgcctgcgggagcgcattgaccgggccgagacgctggggagaacctggtcccgggaggagtccgagctgcagagggcccgggaccaggccgaccaggagtgtgggcggctgcagcaggagctgcgggctctggagaggcagaagcagcagcagacactgcagctgcaggaggagtcgaagctgctcagccagaagacggagagcgagcgacagaaggcggcccagcggggccaggagctctcgcggctggaggcggccatcctccgcgagaaggaccagatctacgagaaggagcggacgctccgggacctccacgccaaggtgagccgggaggagctcagccaggagacccagacgcgagagaccaacctttccaccaagatctccatcctggaacccgagacggggaaggacatgtccccatacgaggcctacaagaggggcatcatcgacaggggccagtacttgcagctgcaggagctcgagtgtgactgggaggaggtcaccacctcggggccctgtggggaggagtctgtgctcctggaccgcaagagcgggaagcagtactccatcgaggccgccctccgctgccggcgcatctctaaggaggagtaccatctgtacaaggacggccacctgcccatctccgagtttgcgctgcttgtagctggggagaccaagccaagctcctcactctccatcggctctatcatctccaagtccccgctcgcctccccggccccccagagcaccagtttcttctctcccagcttctctctcgggctcggtgatgacagcttccctatcgccgggatctatgacacaaccacagacaacaagtgcagcatcaagacggccgtggccaagaacatgctggaccccatcactgggcagaagctactggaggcccaggcggccacagggggcatcgtggacctgctcagccgtgagcgctactctgtgcacaaggcgatggagaggggcctgatcgagaacacctccacacagaggctgcttaacgcccagaaggccttcaccggcatcgaggaccccgtcaccaagaagaggctctcggtgggcgaggccgtccagaagggctggatgccccgggagagcgtgctcccacacctgcaggtgcagcacctgaccggggggctcatcgaccccaagaggacaggccgcatccccatccagcaggccctcctctccgggatgatcagtgaagagctggcccagctcctgcaggacgagtccagctacgagaaggatttgacagaccccatctccaaggaacggctgagctacaaggaggccatgggccgctgccgcaaagaccccctgagcggcctgctgctcctgccagcggcactggaggggtaccgctgctaccgctccgcctcccccaccgtcccgcgctcccttcgctgacacgggccaaggagccagtggggaagtgcgtgtgttgggccaggtaggatacgtacacctcttgcctcagagcagcctcatcccaggcagtgggtcttccctctgtccaaccactgttttattattttactaacatggtgatgggctccctcccctaaccttggtgcctgatccatccccagaccaggacagcagccactcagttcttcctccacctccacccagtgatcccaataaacgaattctgtctccccgtg

SEQ ID NO: 417 - DNA, 2126 bp, Homo sapiens
gctctgtcagtaacacatgtgtaagagccgcggagggagcgagcgagccggctagaggccagcgccgccgccgccgccgcctccgagccgggcagcaacagccccggcagcggcgcaggctccagcgcgccgggcccggccggccgcagcccccgacgcctgggtgcgcctgcctgccggcctccgcaccgtccgccgccgctcccggggctgttgtgtctgcgactgctcccggccggaggtgcagggagctcagccgagccgccgctgccatcccggagcgagcaagcgagcgagcgcgcgggagggaggaaggcggcggcggaggaggaggaggagcgggaggagcgcgggcgggggcgggggccgccgggcgggggaatatacaaagtgaagccacattgccaaacttgcagcagcgattgcagcagttgctgccgctgcgccgcgcctgaagccgcgccgcgcgggccgagggctcctgcagctgctcgcgcgcagtcggaggcggagaaggacgaagactgagactgacacttctgctcccggccgcccggcacttacgcgggggccccccaacccgccccagagcaacgcgatttaaaaaaaaaaaaaaagccgcccttagccccctcctctcctttcctgcttctgcgagaactccctccctccctccagctccgccagcccaggcgccccttccctggaagccgagcggcttcgctcgcatttcaccgccgccgcctctcgcaatattgcaatataggggaaaagcagaccatggtgaatccgggcagcagctcgcagccgcccccggtgacggccggctccctctcctggaagcggtgcgcaggctgcgggggcaagattgcggaccgctttctgctctatgccatggacagctattggcacagccggtgcctcaagtgctcctgctgccaggcgcagctgggcgacatcggcacgtcctgttacaccaaaagtggcatgatcctttgcagaaatgactacattaggttatttggaaatagcggtgcttgcagcgcttgcggacagtcgattcctgcgagtgaactcgtcatgagggcgcaaggcaatgtgtatcatcttaagtgttttacatgctctacctgccggaatcgcctggtcccgggagatcggtttcactacatcaatggcagtttattttgtgaacatgatagacctacagctctcatcaatggccatttgaattcacttcagagcaatccactactgccagaccagaaggtctgctaaaaggtcagagtaatgcagaatgcgtgccttcatctcagatttgttcatcacaggtggatcccatgtgtcttcagtagacaagtcacctttgtagctagcaccagtgccagctccatgccattgcaccttctttagtcttgattgcccttcccgcatttattggtgtattaaaatgactgaatatgaacattaaggactccatgaacctgggctaatgggagactgtagagaaaatgaaaaaagatccaccagaggacatcttggggagggggagggagctgggggggagggaaatgactaatgaagctaattaaaagaagcattcaaatctgctttctaccctcattaacaattagcagggcactggccagagtttgtaccctgtgttttaccttaacaacattctatttgctctttgtatatttaagtgttgtaaggaaacgtgtttcaatcaaaactgaccatgagataaaggaaagagatgtggcttttgtgatattctatcacaaacacttattgtatctctgtaaaatacaatgtatgtatgcatgtaagtgtttttgtcctaatgttgctactcccatggcaaagaaaaaaaaaagaatgaaaaaaagaaaaaaaatttggaaaaaaaaatcaggctcatagcagctactgtgtagaaaattccccctacttctaatttgctgaatgaagaaaaaaaaaaatcttttatttgtgatattttcagagacatttgctctagtatggtgtatttaaataataaaaacttaaaagaaaaaataaaaaaaaaaaaaaaaaaaaaaaaaaaaaaaaaaaaaaaaaaaaaaaaaaaaaaaaaaaaaaaa

SEQ ID NO: 418 - DNA, 5316 bp, Homo sapiens
atcatggcggatggccccaggtgtaagcgcagaaagcaggcgaacccgcggcgcaataacgttacaaattataatactgtggtagaaacaaattcagattcagatgatgaagacaaactgcatattgtggaagaagaaagtgttacagatgcagctgactgtgaaggtgtaccagaggatgacctgccaacagaccagacagtgttaccagggaggagcagtgaaagagaagggaatgctaagaactgctgggaggatgacagaaaggaagggcaagaaatcctggggcctgaagctcaggcagatgaagcaggatgtacagtaaaagatgatgaatgcgagtcagatgcagaaaatgagcaaaaccatgatcctaatgttgaagagtttctacaacaacaagacactgctgtcatttttcctgaggcacctgaagaggaccagaggcagggcacaccagaagccagtggtcatgatgaaaatggaacaccagatgcattttcacaattactcacctgtccatattgtgatagaggctataaacgctttacctctctgaaagaacacattaaatatcgtcatgaaaagaatgaagataactttagttgctccctgtgcagttacacctttgcatacagaacccaacttgaacgtcacatgacatcacataaatcaggaagagatcaaagacatgtgacgcagtctgggtgtaatcgtaaattcaaatgcactgagtgtggaaaagctttcaaatacaaacatcacctaaaagagcacttaagaattcacagtggagagaagccatatgaatgcccaaactgcaagaaacgcttttcccattctggctcctatagctcacacataagcagtaagaaatgtatcagcttgatacctgtgaatgggcgaccaagaacaggactcaagacatctcagtgttcttcaccgtctctttcagcatcaccaggcagtcccacacgaccacagatacggcaaaagatagagaataaaccccttcaagaacaactttctgttaaccaaattaaaactgaacctgtggattatgaattcaaacccatagtggttgcttcaggaatcaactgttcaacccctttacaaaatggggttttcactggtggtggcccattacaggcaaccagttctcctcagggcatggtgcaagctgttgttctgccaacagttggtttggtgtctcccataagtatcaatttaagtgatattcagaatgtacttaaagtggcggtagatggtaatgtaataaggcaagtgttggagaataatcaagccaatcttgcatccaaagaacaagaaacaatcaatgcttcacccatacaacaaggtggccattctgttatttcagccatcagtcttcctttggttgatcaagatggaacaaccaaaattatcatcaactacagtcttgagcagcctagccaacttcaagttgttcctcaaaatttaaaaaaagaaaatccagtcgctacaaacagttgtaaaagtgaaaagttaccagaagatcttactgttaagtctgagaaggacaaaagctttgaagggggggtgaatgatagcacttgtcttctgtgtgatgattgtccaggagatattaatgcacttccagaattaaagcactatgacctaaagcagcctactcagcctcctccactccctgcagcagaagctgagaagcctgagtcctctgtttcatcagctactggagatggcaatttgtctcctagtcagccacctttaaagaacctcttgtctctcctaaaagcatattatgctttgaatgcacaaccaagtgcagaagagctctcaaaaattgctgattcagtaaacctaccactggatgtagtaaaaaagtggtttgaaaagatgcaagctggacagatttcagtgcagtcttctgaaccatcttctcctgaaccaggcaaagtaaatatccctgccaagaacaatgatcagcctcaatctgcaaatgcaaatgaaccccaggacagcacagtaaatctacaaagtcctttgaagatgactaactccccagttttaccagtgggatcaaccaccaatggttccagaagtagtacaccatccccatcacctctaaacctttcctcatccagaaatacacagggttacttgtacacagctgagggtgcacaagaagagccacaagtagaacctcttgatctttcactaccaaagcaacagggagaattattagaaaggtcaactatcactagtgtttaccagaacagtgtttattctgtccaggaagaacccttgaacttgtcttgcgcaaaaaaggagccacaaaaggacagttgtgttacagactcagaaccagttgtaaatgtaatcccaccaagtgccaaccccataaatatcgctatacctacagtcactgcccagttacccacaatcgtggccattgctgaccagaacagtgttccatgcttaagagcgctagctgccaataagcaaacgattctgattccccaggtggcatacacctactcaactacggtcagccctgcagtccaagaaccacccttgaaagtgatccagccaaatggaaatcaggatgaaagacaagatactagctcagaaggagtatcaaatgtagaggatcagaatgactctgattctacaccgcccaaaaagaaaatgcggaagacagaaaatggaatgtatgcttgtgatttgtgtgacaagatattccaaaagagtagttcattattgagacataaatatgaacacacaggtaaaagacctcatgagtgtggaatctgtaaaaaggcatttaaacacaaacatcatttgattgaacacatgcgattacattctggagaaaagccctatcaatgtgacaaatgtggaaagcgcttctcacactctgggtcttattctcaacacatgaatcatcgctactcctactgtaagagagaagcggaagaacgtgacagcacagagcaggaagaggcagggcctgaaatcctctcgaatgagcacgtgggtgccagggcgtctccctcacagggcgactcggacgagagagagagtttgacaagggaagaggatgaagacagtgaaaaagaggaagaggaggaggataaagagatggaagaattgcaggaagaaaaagaatgtgaaaaaccacaaggggatgaggaagaggaggaggaggaggaagaagtggaagaagaagaggtagaagaggcagagaatgagggagaagaagcaaaaactgaaggtctgatgaaggatgacagggctgaaagtcaagcaagcagcttaggacaaaaagtaggcgagagtagtgagcaagtgtctgaagaaaagacaaatgaagcctaatcgtttttctagaaggaaaataaattctaattgataatgaatttcgttcaatattatccttgcttttcatggaaacacagtaacctgtatgctgtgattcctgttcactactgtgtgtgtgtgcgcgtgcattgattactatccatttctttagtcaacgctctccacttcctgatttctgctttaaggaaaactgtgaactttctgcttcatgtatcagttttaaagcatcccaggcaaagatcatctacagattctaggaattctctcccctgaaatcaaaacctggagacttttttttcttattttagttgagaagttcataaactgctcaaggattagttttccaggactctgcggaggaacggcaggaagaacctcagagagggcagaggtgacttcaaagtgctggggactccgtcctgagggtcacttggccctgagcccctgcgtgcccttgcggaagcccagaagcttcttcctgctgcacctcccgtttccgctgctgctgacgtttatgcatttcatgatggggtccaacaagaacacctgacttgggtgaagttgtgcaatattggaggctgactgtagggctgggcagctgggagacaggctcatggctcatggctcatggctcagggcggtgcctgccctgggccgggacccccctccccaccccccacctaggctttttgggttttgttcaaggaaggtaaagtgagaggtttaggtcagtgtttttaagtttttgttttttttttaaagcaaatcctgtatatgtatctacatgggagataggtagacactacttatttgttacattttgtactatacgtttgtgttccaggtttcagcttccctcgctcctgttgttaagaagcgtccctgtcagcacaggtgtgcattgaggaaggggccccagggccttcgctccctcagcactggggtggaggcggcaggaaggggcggcccttacctggcaggtctgggcgcacctttagcaggtggactccgtggggctccaccagccagaagcctctggaaggcaacgaaggcaatgctgctccctgagtccagtccccgcccccaaacccagcccaggtgccttcagctacttcggcttcttaaaccctgcagtgttaaacagaggcattgagaaaggggaaaggcgggtatttttaaaagccaaagattgacccaagttacttgagggtagggaggcgggcccagtgcaggaggctgcatccctggcctgctggtgcccaccgggggctgtgcctgtgccgggccgcaggaagctggctgcccccattcctgctgctgctgctgctgctgctctgtggctgtttcaaagactgggcgaaaggctgtccggagggcagaccaggtgccttgccgcagagaaaacaccaaagtctcctgttcgctcataaagaagtttttgggatgggagagaatccagaccatcttggggcagccaggcccttgccttcatttttacagaggtagcacaactgattccaacacaaaaccccttcccctttttaaaatgatttctgttctaatgccatagatcaaaggcctcagaaaccattgtgtgtttcctctttgaagcaatgacaagcactttactttcacggtggtttttgttttttcttattgctgtggaacctcttttggaggacgttaaaggcgtgttttacttgtttttttaagagtgtgtgatgtgtgttttgtagatttcttgacagtgctgtaatacagacggcaatgcaatagcctatttaaagaactacgtgatctgattgagatgtacatagtttttttttttaccataactgaattattttatctcttatgttatcatgagaaatgtatgccaaatgattagttgatgtatgttttttaatttaatatttaaataaaatatttggaagg

SEQ ID NO: 419 - DNA, 1640 bp, Homo sapiens
ggatccacgagctggagtgattagagccctggaagggaattgttactcccgtggagaagtccccttttcctggcagtcgtctgcactgtacacgctggatgcctctctccatccaccccactcactcgctcctctctcacctcctctctccctctcctgcattgatttttttttttcctttttagttgactgaaacaaaacaaaacaaaagggccactggatgtctgccttcttggggggtgagccagacagactgacaaacaaacagccccaactgtgttcgggggagggtttcgcctcccgttttgcccggcagcagcagcatggacgtgttggctagttatagtatattccaggagctacaacttgtccacgacaccggctacttctcagctttaccatccctggaggagacctggcagcagacatgccttgaattggaacgctacctacagacggagccccggaggatctcagagacctttggtgaggacttggactgtttcctccacgcttcccctcccccgtgcattgaggaaagcttccgtcgcttagaccccctgctgctccccgtggaagcggccatctgtgagaagagctcggcagtggacatcttgctctctcgggacaagttgctatctgagacctgcctcagcctccagccggccagctcttctctagacagctacacagccgtcaaccaggcccagctcaacgcagtgacctcattaacgcccccatcgtcccctgagctcagccgccatctggtcaaaacctcacaaactctctctgccgtggatggcacggtgacgttgaaactggtggccaagaaggctgctctcagctccgtaaaggtgggaggggtcgcaacagctgcagcagccgtgacggctgcgggggccgttaagagtggacagagcgacagtgaccaaggagggctaggggctgaagcatgtcccgaaaacaagaagagggttcaccgctgtcagtttaacgggtgccggaaagtttatacaaaaagctcccacttaaaggcccaccagaggactcacacaggtgagaagccttataagtgctcatgggagggatgtgagtggcgttttgcacgaagcgatgagctcacgaggcactacaggaaacacacaggtgcaaagcccttcaaatgcaaccactgcgacaggtgtttttccaggtctgaccatcttgccctccacatgaagagacatatctaaaaaaccgaaaggccagagttgccatggcatcggctagtgtctaaaggaaacgccatgaggcagggggctggacttcaggcggggacccattgcctcgcagaagaaagctctcacttataaacctctgtacacacacacacacacacacacatatacacacactcacagacccacacacatacacactgtcatgcactcaactatatttaaaatatatacgtctattctttatgccttgccctagccagatggaagaagatgaagaaggaaaccaggtgaactcagcaaggcagactggctgcttacttcagcactattggaattatttcccgctgttgccaatggaaatcaaagaaaatggatgtgacgtctgtgcaggtggacggcagtccgaggggcttatttcac

SEQ ID NO: 420 - DNA, 1455 bp, Homo sapiens
ggggcccaggccccgccgtcgcgccagccccgcggccccagcgggccgggcactcgcagccgcgctcgggccggcggacgctcgcgccggctcaccatgcactgccacgccgagctgaggctgagctcgcccggccagctcaaagcagccaggcggcgctacaagactttcatgatcgacgagatcctctccaaggagacctgcgattactttgagaaactttccctctactccgtgtgcccgtcgctggtcgtgcgacccaagcccctgcattcctgtacgggctccccttccctgcgggcatatccgctcctctcggtgatcacccgccagcccactgtcatctcccacctggtccctgccaccccgggaatcgcccaggcactgtcctgccaccaggtcaccgaggcggtctctgctgaggccccagggggcgaggccctagccagcagcgagtcagagacggaacagcccacgccccgacagaagaagccccgccggagtcgcaccatcttcaccgagctgcagctcatgggcctggagaagaaattccagaagcagaagtatttgtcaaccccagacaggttggacttggctcagtctctgggactcactcagctgcaggtgaagacctggtatcagaatcgcaggatgaaatggaagaaaatggttcttaaaggtggacaggaagcacccacaaaacccaaaggtcgccccaagaagaactccatccccacatcagaagagattgaagctgaagagaagatgaacagccaggcccagggtcaggagcagctggagccctctcaggggcaggaggagctctgtgaagcacaggaaccgaaagcacgtgatgtccccttagagatggcagagccaccagacccgccccaggagttgccaataccctcttcggaacccccaccattaagctaaagtaaaacccttttgagggaagagggagactggggagaagggaaaagagagaaggcagggagagtagggagagaaaaccttccagcagcccagtaaactgcgggcgaagagatctacccgtctccctccctcccacagttaccattggccttgtcatcgcaagcatttgacaaagacttgcttgtcttgggcctgtcacctcctgaaaggctgctttagctgtggatgcccttgattaagggagagagcgcctaggagctgcctgccccagctggggtgacggctgtagggctgggtctatgttgcaagccctatatcctagcatgcagtggaaagtgcttagctctctccctcctgacctctgggcagccagtcatcaaagcagagagacgtggcggcatgtgggcagcatgcccaggttccttgctgactcagcacttatttctgtagttttaaaaaagaatttaatgtttttggttgtatttttttgggggggtgagggtgggcaaaaacatggga

SEQ ID NO: 421 - DNA, 926 bp, Homo sapiens
ggggcccattctgtttcagccagtcgccaagaatcatgaaagtcgccagtggcagcaccgccaccgccgccgcgggccccagctgcgcgctgaaggccggcaagacagcgagcggtgcgggcgaggtggtgcgctgtctgtctgagcagagcgtggccatctcgcgctgccggggcgccggggcgcgcctgcctgccctgctggacgagcagcaggtaaacgtgctgctctacgacatgaacggctgttactcacgcctcaaggagctggtgcccaccctgccccagaaccgcaaggtgagcaaggtggagattctccagcacgtcatcgactacatcagggaccttcagttggagctgaactcggaatccgaagttgggacccccgggggccgagggctgccggtccgggctccgctcagcaccctcaacggcgagatcagcgccctgacggccgaggcggcatgcgttcctgcggacgatcgcatcttgtgtcgctgaagcgcctcccccagggaccggcggaccccagccatccagggggcaagaggaattacgtgctctgtgggtctcccccaacgcgcctcgccggatctgagggagaacaagaccgatcggcggccactgcgcccttaactgcatccagcctggggctgaggctgaggcactggcgaggagagggcgctcctctctgcacacctactagtcaccagagactttagggggtgggattccactcgtgtgtttctattttttgaaaagcagacattttaaaaaatggtcacgtttggtgcttctcagatttctgaggaaattgctttgtattgtatattacaatgatcaccgactgagaatattgttttacaatagttctgtggggctgtttttttgttattaaacaaataatttagatggtgaaaaaaaaaa

SEQ ID NO: 422 - DNA, 2013 bp, Homo sapiens
  misc_feature (301)..(301): "n" = a, t, g, or c.
  misc_feature (1707)..(1707): "n" = a, t, g, or c.
  misc_feature (1722)..(1722): "n" = a, t, g, or c.
  misc_feature (1756)..(1756): "n" = a, t, g, or c.
  misc_feature (1880)..(1880): "n" = a, t, g, or c.
  misc_feature (1882)..(1882): "n" = a, t, g, or c.
  misc_feature (1885)..(1885): "n" = a, t, g, or c.
  misc_feature (1887)..(1887): "n" = a, t, g, or c.
gaattccaatcagaacaagctgttctcagacattaatctgaatgatcaggagtggcaagaattaatagatgaattggacaacacggttcctgaggatgacatacaggacctgttcaacgaagactttgaagagaagaaggagccagaattctcgcagacagcaactgagcacccctctctcccaggagagtgcgagcgtgaagagcgacccctctcactctcccttcggacatgtctccatgggatctccccaggcgaggtcttcttcttctggtcctcccttttcttctgtctccacggncactagtttaccttctggtgacagcactcccgcaggtccaaaccctgcaagctcaccagcaaacttgtgcttgtccagtccccttcaaaacttccaaaccaagcccacactccaggccaagctccacctcggcctggaaatggttatctcctgaatccggcagcagtgacagtggccggttcagcgtcagggcctgtggctgtgcccagctctgacatgtctccagcagaacagctcaaacagatggctgcacagcagcaacaaagggccaaactcatgcagcagaaacagcaacagcaacagcagcagcagcagcagcagcagcaacagcactcaaatcagacttcaaattggtctcccttaggacctccctctagtccatatggagcagcttttactgcagaaaaaccaaatagcccaatgatgtacccccaagcctttaacaaccaaaaccctatagtgcctccaatggcaaacaacctgcagaagacaacaatgaataactacctccctcagaatcacatgaatatgatcaatcagcagccaaataacttgggtacaaactccttaaacaaacagcacaatattctgacttatggcaacactaaacccctgacccacttcaatgcagacctgagtcagaggatgacaccaccagtggccaaccccaacaaaaaccccttgatgccgtatatccagcagcagcaacagcagcagcaacagcaacagcagcagcagcagcagcagcagccgccacctccacagctccaggcccccagggcacacctgagcgaagaccagaaacgcctgcttctcatgaagcagaaaggagtgatgaatcagcccatggcttacgctgcacttccatcccacggtcaggtaagtgtgaaagtgacacactcttcgagcagttcttgtggtgcatttcaagactgtcgatgtgtgatgttctacaaagcttccactgtagtggggtctaattgcctgcagaaaacctctttacaacatcctcaggtagtggccaggtttggagtgttctttttccatttctcctaagaaatggaaaagggtggcatgataaactttcgtgtatttcagtgtctaggaatcaaacttcttttattcccaactgcagataagaattacataaaattctcactctgagggagggaggctgcagaggtcactccaccaaacacggcactacctctgtagcttctctcccagcttgcatgatcccaggctctgggtggtgggaagcaggggacattcagggctgtctacaacagttttataaggccctgagcagccttcgagttttttaaattttattttagtgaatacatgcattaaaataaaacaacaacaacaacaacaacaaaaacacaaagaggctagagatttcnccgtttctacccccnaaataacgcttgctatcaagactttggagggggntgggggaaaagaatttaaaagccaaataatttttttttcataaaaagtaaaagctaccataaaacatttttttttctgtcacactgattaaatttcttctgaaaagccgcacatatagacaaancnaancnaaaattcctgaactggacaaacagcaaatactcaacagggttgttaacctaggtaacagttcagtagtttaaagaatcttttagacatctggaagcctttctattcattcctcagtacagtgttcc

SEQ ID NO: 423 - DNA, 5838 bp, Homo sapiens
ccgggcaggtggctcatgctcgggagcgtggttgagcggctggcgcggttgtcctggagcaggggcgcaggaattctgatgtgaaactaacagtctgtgagccctggaacctccgctcagagaagatgaaggatatcgacataggaaaagagtatatcatccccagtcctgggtatagaagtgtgagggagagaaccagcacttctgggacgcacagagaccgtgaagattccaagttcaggagaactcgaccgttggaatgccaagatgccttggaaacagcagcccgagccgagggcctctctcttgatgcctccatgcattctcagctcagaatcctggatgaggagcatcccaagggaaagtaccatcatggcttgagtgctctgaagcccatccggactacttccaaacaccagcacccagtggacaatgctgggcttttttcctgtatgactttttcgtggctttcttctctggcccgtgtggcccacaagaagggggagctctcaatggaagacgtgtggtctctgtccaagcacgagtcttctgacgtgaactgcagaagactagagagactgtggcaagaagagctgaatgaagttgggccagacgctgcttccctgcgaagggttgtgtggatcttctgccgcaccaggctcatcctgtccatcgtgtgcctgatgatcacgcagctggctggcttcagtggaccagccttcatggtgaaacacctcttggagtatacccaggcaacagagtctaacctgcagtacagcttgttgttagtgctgggcctcctcctgacggaaatcgtgcggtcttggtcgcttgcactgacttgggcattgaattaccgaaccggtgtccgcttgcggggggccatcctaaccatggcatttaagaagatccttaagttaaagaacattaaagagaaatccctgggtgagctcatcaacatttgctccaacgatgggcagagaatgtttgaggcagcagccgttggcagcctgctggctggaggacccgttgttgccatcttaggcatgatttataatgtaattattctgggaccaacaggcttcctgggatcagctgtttttatcctcttttacccagcaatgatgtttgcatcacggctcacagcatatttcaggagaaaatgcgtggccgccacggatgaacgtgtccagaagatgaatgaagttcttacttacattaaatttatcaaaatgtatgcctgggtcaaagcattttctcagagtgttcaaaaaatccgcgaggaggagcgtcggatattggaaaaagccgggtacttccagggtatcactgtgggtgtggctcccattgtggtggtgattgccagcgtggtgaccttctctgttcatatgaccctgggcttcgatctgacagcagcacaggctttcacagtggtgacagtcttcaattccatgacttttgctttgaaagtaacaccgttttcagtaaagtccctctcagaagcctcagtggctgttgacagatttaagagtttgtttctaatggaagaggttcacatgataaagaacaaaccagccagtcctcacatcaagatagagatgaaaaatgccaccttggcatgggactcctcccactccagtatccagaactcgcccaagctgacccccaaaatgaaaaaagacaagagggcttccaggggcaagaaagagaaggtgaggcagctgcagcgcactgagcatcaggcggtgctggcagagcagaaaggccacctcctcctggacagtgacgagcggcccagtcccgaagaggaagaaggcaagcacatccacctgggccacctgcgcttacagaggacactgcacagcatcgatctggagatccaagagggtaaactggttggaatctgcggcagtgtgggaagtggaaaaacctctctcatttcagccattttaggccagatgacgcttctagagggcagcattgcaatcagtggaaccttcgcttatgtggcccagcaggcctggatcctcaatgctactctgagagacaacatcctgtttgggaaggaatatgatgaagaaagatacaactctgtgctgaacagctgctgcctgaggcctgacctggccattcttcccagcagcgacctgacggagattggagagcgaggagccaacctgagcggtgggcagcgccagaggatcagccttgcccgggccttgtatagtgacaggagcatctacatcctggacgaccccctcagtgccttagatgcccatgtgggcaaccacatcttcaatagtgctatccggaaacatctcaagtccaagacagttctgtttgttacccaccagttacagtacctggttgactgtgatgaagtgatcttcatgaaagagggctgtattacggaaagaggcacccatgaggaactgatgaatttaaatggtgactatgctaccatttttaataacctgttgctgggagagacaccgccagttgagatcaattcaaaaaaggaaaccagtggttcacagaagaagtcacaagacaagggtcctaaaacaggatcagtaaagaaggaaaaagcagtaaagccagaggaagggcagcttgtgcagctggaagagaaagggcagggttcagtgccctggtcagtatatggtgtctacatccaggctgctgggggccccttggcattcctggttattatggcccttttcatgctgaatgtaggcagcaccgccttcagcacctggtggttgagttactggatcaagcaaggaagcgggaacaccactgtgactcgagggaacgagacctcggtgagtgacagcatgaaggacaatcctcatatgcagtactatgccagcatctacgccctctccatggcagtcatgctgatcctgaaagccattcgaggagttgtctttgtcaagggcacgctgcgagcttcctcccggctgcatgacgagcttttccgaaggatccttcgaagccctatgaagttttttgacacgacccccacagggaggattctcaacaggttttccaaagacatggatgaagttgacgtgcggctgccgttccaggccgagatgttcatccagaacgttatcctggtgttcttctgtgtgggaatgatcgcaggagtcttcccgtggttccttgtggcagtggggccccttgtcatcctcttttcagtcctgcacattgtctccagggtcctgattcgggagctgaagcgtctggacaatatcacgcagtcacctttcctctcccacatcacgtccagcatacagggccttgccaccatccacgcctacaataaagggcaggagtttctgcacagataccaggagctgctggatgacaaccaagctcctttttttttgtttacgtgtgcgatgcggtggctggctgtgcggctggacctcatcagcatcgccctcatcaccaccacggggctgatgatcgttcttatgcacgggcagattcccccagcctatgcgggtctcgccatctcttatgctgtccagttaacggggctgttccagtttacggtcagactggcatctgagacagaagctcgattcacctcggtggagaggatcaatcactacattaagactctgtccttggaagcacctgccagaattaagaacaaggctccctcccctgactggccccaggagggagaggtgacctttgagaacgcagagatgaggtaccgagaaaacctccctcttgtcctaaagaaagtatccttcacgatcaaacctaaagagaagattggcattgtggggcggacaggatcagggaagtcctcgctggggatggccctcttccgtctggtggagttatctggaggctgcatcaagattgatggagtgagaatcagtgatattggccttgccgacctccgaagcaaactctctatcattcctcaagagccggtgctgttcagtggcactgtcagatcaaatttggaccccttcaaccagtacactgaagaccagatttgggatgccctggagaggacacacatgaaagaatgtattgctcagctacctctgaaacttgaatctgaagtgatggagaatggggataacttctcagtgggggaacggcagctcttgtgcatagctagagccctgctccgccactgtaagattctgattttagatgaagccacagctgccatggacacagagacagacttattgattcaagagaccatccgagaagcatttgcagactgtaccatgctgaccattgcccatcgcctgcacacggttctaggctccgataggattatggtgctggcccagggacaggtggtggagtttgacaccccatcggtccttctgtccaacgacagttcccgattctatgccatgtttgctgctgcagagaacaaggtcgctgtcaagggctgactcctccctgttgacgaagtctcttttctttagagcattgccattccctgcctggggcgggcccctcatcgcgtcctcctaccgaaaccttgcctttctcgattttatctttcgcacagcagttccggattggcttgtgtgtttcacttttagggagagtcatattttgattattgtatttattccatattcatgtaaacaaaatttagtttttgttcttaattgcactctaaaaggttcagggaaccgttattataattgtatcagaggcctataatgaagctttatacgtgtagctatatctatatataattctgtacatagcctatatttacagtgaaaatgtaagctgtttattttatattaaaataagcactgtgctaataacagtgcatattcctttctatcatttttgtacagtttgctgtactagagatctggttttgctattagactgtaggaagagtagcatttcattcttctctagctggtggtttcacggtgccaggttttctgggtgtccaaaggaagacgtgtggcaatagtgggccctccgacagccccctctgccgcctccccacagccgctccaggggtggctggagacgggtgggcggctggagaccatgcagagcgccgtgagttctcagggctcctgccttctgtcctggtgtcacttactgtttctgtcaggagagcagcggggcgaagcccaggccccttttcactccctccatcaagaatggggatcacagagacattcctccgagccggggagtttctttcctgccttcttctttttgctgttgtttctaaacaagaatcagtctatccacagagagtcccactgcctcaggttcctatggctggccactgcacagagctctccagctccaagacctgttggttccaagccctggagccaactgctgctttttgaggtggcactttttcatttgcctattcccacacctccacagttcagtggcagggctcaggatttcgtgggtctgttttcctttctcaccgcagtcgtcgcacagtctctctctctctctcccctcaaagtctgcaactttaagcagctcttgctaatcagtgtctcacactggcgtagaagtttttgtactgtaaagagacctacctcaggttgctggttgctgtgtggtttggtgtgttcccgcaaaccccctttgtgctgtggggctggtagctcaggtgggcgtggtcactgctgtcatcagttgaatggtcagcgttgcatgtcgtgaccaactagacattctgtcgccttagcatgtttgctgaacaccttgtggaagcaaaaatctgaaaatgtgaataaaattattttggattttgtaaaaaaaaaaaaaaaaaaaaaaaaaaaaaaaaaaaaa

SEQ ID NO: 424 - DNA, 3088 bp, Homo sapiens
acaaaaaagcttttacgaggtatcagcacttttctttcattagggggaaggcgtgaggaaagtaccaaacagcagcggagttttaaactttaaatagacaggtctgagtgcctgaacttgccttttcattttacttcatcctccaaggagttcaatcacttggcgtgacttcactacttttaagcaaaagagtggtgcccaggcaacatgggtgactggagcgccttaggcaaactccttgacaaggttcaagcctactcaactgctggagggaaggtgtggctgtcagtacttttcattttccgaatcctgctgctggggacagcggttgagtcagcctggggagatgagcagtctgcctttcgttgtaacactcagcaacctggttgtgaaaatgtctgctatgacaagtctttcccaatctctcatgtgcgcttctgggtcctgcagatcatatttgtgtctgtacccacactcttgtacctggctcatgtgttctatgtgatgcgaaaggaagagaaactgaacaagaaagaggaagaactcaaggttgcccaaactgatggtgtcaatgtggacatgcacttgaagcagattgagataaagaagttcaagtacggtattgaagagcatggtaaggtgaaaatgcgaggggggttgctgcgaacctacatcatcagtatcctcttcaagtctatctttgaggtggccttcttgctgatccagtggtacatctatggattcagcttgagtgctgtttacacttgcaaaagagatccctgcccacatcaggtggactgtttcctctctcgccccacggagaaaaccatcttcatcatcttcatgctggtggtgtccttggtgtccctggccttgaatatcattgaactcttctatgttttcttcaagggcgttaaggatcgggttaagggaaagagcgacccttaccatgcgaccagtggtgcgctgagccctgccaaagactgtgggtctcaaaaatatgcttatttcaatggctgctcctcaccaaccgctcccctctcgcctatgtctcctcctgggtacaagctggttactggcgacagaaacaattcttcttgccgcaattacaacaagcaagcaagtgagcaaaactgggctaattacagtgcagaacaaaatcgaatggggcaggcgggaagcaccatctctaactcccatgcacagccttttgatttccccgatgataaccagaattctaaaaaactagctgctggacatgaattacagccactagccattgtggaccagcgaccttcaagcagagccagcagtcgtgccagcagcagacctcggcctgatgacctggagatctagatacaggcttgaaagcatcaagattccactcaattgtggagaagaaaaaaggtgctgtagaaagtgcaccaggtgttaattttgatccggtggaggtggtactcaacagccttattcatgaggcttagaaaacacaaagacattagaatacctaggttcactgggggtgtatggggtagatgggtggagagggaggggataagagaggtgcatgttggtatttaaagtagtggattcaaagaacttagattataaataagagttccattaggtgatacatagataagggctttttctccccgcaaacacccctaagaatggttctgtgtatgtgaatgagcgggtggtaattgtggctaaatatttttgttttaccaagaaactgaaataattctggccaggaataaatacttcctgaacatcttaggtcttttcaacaagaaaaagacagaggattgtccttaagtccctgctaaaacattccattgttaaaatttgcactttgaaggtaagctttctaggcctgaccctccaggtgtcaatggacttgtgctactatatttttttattcttggtatcagtttaaaattcagacaaggcccacagaataagattttccatgcatttgcaaatacgtatattctttttccatccacttgcacaatatcattaccatcactttttcatcattcctcagctactactcacattcatttaatggtttctgtaaacatttttaagacagttgggatgtcacttaacattttttttttttgagctaaagtcagggaatcaagccatgcttaatatttaacaatcacttatatgtgtgtcgaagagtttgttttgtttgtcatgtattggtacaagcagatacagtataaactcacaaacacagatttgaaaataatgcacatatggtgttcaaatttgaacctttctcatggatttttgtggtgtgggccaatatggtgtttacattatataattcctgctgtggcaagtaaagcacactttttttttctcctaaaatgtttttccctgtgtatcctattatggatactggttttgttaattatgattctttattttctctcctttttttaggatatagcagtaatgctattactgaaatgaatttcctttttctgaaatgtaatcattgatgcttgaatgatagaattttagtactgtaaacaggctttagtcattaatgtgagagacttagaaaaaatgcttagagtggactattaaatgtgcctaaatgaattttgcagtaactggtattcttgggttttcctacttaatacacagtaattcagaacttgtattctattatgagtttagcagtcttttggagtgaccagcaactttgatgtttgcactaagattttatttggaatgcaagagaggttgaaagaggattcagtagtacacatacaactaatttatttgaactatatgttgaagacatctaccagtttctccaaatgccttttttaaaactcatcacagaagattggtgaaaatgctgagtatgacacttttcttcttgcatgcatgtcagctacataaacagttttgtacaatgaaaattactaatttgtttgacattccatgttaaactacggtcatgttcagcttcattgcatgtaatgtagacctagtccatcagatcatgtgttctggagagtgttctttattcaataaagttttaatttagtataaacat

SEQ ID NO: 425 - DNA, 1316 bp, Homo sapiens
agctagacgccccgaggtcggagtgaagcgccgggaccgagccccgtctcccagggagtccggggcgcacggcaccgaggagagcgcgggagccaacctgggcgcatcatgcgcagggcccgggacgctgggccggtctacaccgccgcctgggtcacgtggcccggacgggccggcggctgccccggccggggggcgggggtcgcgccggggttgcgctggacgacggagagcggcgggcccgcagcggcctggagcctcccaacccgcgccgcgctggccctcgagcgtaggagccgccccctgcccccccgcgccggccccgcgcccggccgcccgccccctatatagcgcgccccagcagggcccgcgccaggccgccagcctcggagtgggcgcgggacagtgcgcggcgccccgcagccaggcccccgcccccgccgcatccacctcctccgccgcctgcgacccaacgggcgccccccgccggcagctcgcgccgggcccccgcggccaccatgaagaaggaggtgtgctccgtggccttcctcaaggccgtgttcgcagagttcttggccaccctcatcttcgtcttctttggcctgggctcggccctcaagtggccgtcggcgctgcctaccatcctgcagatcgcgctggcgtttggcctggccataggcacgctggcccaggccctgggacccgtgagcggcggccacatcaaccccgccatcaccctggccctcttggtgggcaaccagatctcgctgctccgggctttcttctacgtggcggcccagctggtgggcgccattgccggggctggcatcctctacggtgtggcaccgctcaatgcccggggcaatctggccgtcaacgcgctcaacaacaacacaacgcagggccaggccatggtggtggagctgattctgaccttccagctggcactctgcatcttcgcctccactgactcccgccgcaccagccctgtgggctccccagccctgtccattggcctgtctgtcaccctgggccaccttgtcggaatctacttcactggctgctccatgaacccagcccgctcttttggccctgcggtggtcatgaatcggttcagccccgctcactgggttttctgggtagggcccatcgtgggggcggtcctggctgccatcctttacttctacctgctcttccccaactccctgagcctgagtgagcgtgtggccatcatcaaaggcacgtatgagcctgacgaggactgggaggagcagcgggaagagcggaagaagaccatggagctgaccacccgctga

SEQ ID NO: 426 - DNA, 1646 bp, Homo sapiens
cactgcgaagcccagctgcgcgcgccttgggattgactgtccacgctcgcccggctcgtccgacgcgccctccgccagccgacagacacagccgcacgcactgccgtgttctccctgcggctcggacacatagtatgaccattaggtgtttcgtctcccacccattttctatggaaaaccaaggggatcgggccatgatagccactggcagctttgaagaacgggacacctttagagaagcttgatcttggaggcctcaccgtgagaccttacaaagccggattccggcagagttcctctatctcgtcttgttgctgattaaaggtgcccctgtctccagtttttctccatctcctgggacgtagcaggaaatcagcatcatggttgggttcaaggccacagatgtgccccctactgccactgtgaagtttcttggggctggcacagctgcctgcatcgcagatctcatcacctttcctctggatactgctaaagtccggttacagatccaaggagaaagtcaggggccagtgcgcgctacagccagcgcccagtaccgcggtgtgatgggcaccattctgaccatggtgcgtactgagggcccccgaagcctctacaatgggctggttgccggcctgcagcgccaaatgagctttgcctctgtccgcatcggcctgtatgattctgtcaaacagttctacaccaagggctctgagcatgccagcattgggagccgcctcctagcaggcagcaccacaggtgccctggctgtggctgtggcccagcccacggatgtggtaaaggtccgattccaagctcaggcccgggctggaggtggtcggagataccaaagcaccgtcaatgcctacaagaccattgcccgagaggaagggttccggggcctctggaaagggacctctcccaatgttgctcgtaatgccattgtcaactgtgctgagctggtgacctatgacctcatcaaggatgccctcctgaaagccaacctcatgacagatgacctcccttgccacttcacttctgcctttggggcaggcttctgcaccactgtcatcgcctcccctgtagacgtggtcaagacgagatacatgaactctgccctgggccagtacagtagcgctggccactgtgcccttaccatgctccagaaggaggggccccgagccttctacaaagggttcatgccctcctttctccgcttgggttcctggaacgtggtgatgttcgtcacctatgagcagctgaaacgagccctcatggctgcctgcacttcccgagaggctcccttctgagcctctcctgctgctgacctgatcacctctggctttgtctctagccgggccatgctttccttttcttccttctttctcttccctccttcccttctctccttccctctttccccacctcttccttccgctcctttacctaccaccttccctctttctacattctcatctactcattgtctcagtgctggtggagttgacatttgacagtgtgggaggcctcgtaccagccaggatcccaagcgtcccgtcccttggaaagttcagccagaatcttcgtcctgcccccgacagcccagcctagcccacttgtcatccataaagcaagctcaaccttgg

SEQ ID NO: 427 - DNA, 2564 bp, Homo sapiens
tcgccgggtgtcccagtgtcaccaacactcggccgccgccgccagcttggcgcgcaccgccgcctccgccaccgccgacagcgcgcatcctccgtgtccccgctccgccgcccgagcaggtgccactatgcacgtgaagaagtacctgctgaagggcctgcatcggctgcagaagggccccggctacacgtacaaggagctgctggtgtggtactgcgacaacaccaacacccacggccccaagcgcatcatctgtgaggggcccaagaagaaagccatgtggttcctgctcaccctgctcttcgccgccctcgtctgctggcagtggggcatcttcatcaggacctacttgagctgggaggtcagcgtctccctctccgtaggcttcaagaccatggacttccccgccgtcaccatctgcaatgctagccccttcaagtattccaaaatcaagcatttgctgaaggacctggatgagctgatggaagctgtcctggagagaatcctggctcctgagctaagccatgccaatgccaccaggaacctgaacttctccatctggaaccacacacccctggtccttattgatgaacggaacccccaccaccccatggtccttgatctctttggagacaaccacaatggcttaacaagcagctcagcatcagaaaagatctgtaatgcccacgggtgcaaaatggccatgagactatgtagcctcaacaggacccagtgtaccttccggaacttcaccagtgctacccaggcattgacagagtggtacatcctgcaggccaccaacatctttgcacaggtgccacagcaggagctagtagagatgagctaccccggcgagcagatgatcctggcctgcctattcggagctgagccctgcaactaccggaacttcacgtccatcttctaccctcactatggcaactgttacatcttcaactggggcatgacagagaaggcacttccttcggccaaccctggaactgaattcggcctgaagttgatcctggacataggccaggaagactacgtccccttccttgcgtccacgggcggggtcaggctgatgcttcacgagcagaggtcataccccttcatcagagatgagggcatctacgccatgtcggggacagagacgtccatcggggtactcgtggataagcttcagcgcatgggggagccctacagcccgtgcaccgtgaatggttctgaggtccccgtccaaaacttctacagtgactacaacacgacctactccatccaggcctgtcttcgctcctgcttccaagaccacatgatccgtaactgcaactgtggccactacctgtacccactgccccgtggggagaaatactgcaacaaccgggacttcccagactgggcccattgctactcagatctacagatgagcgtggcgcagagagagacctgcattggcatgtgcaaggagtcctgcaatgacacccagtacaagatgaccatctccatggctgactggccttctgaggcctccgaggactggattttccacgtcttgtctcaggagcgggaccaaagcaccaatatcaccctgagcaggaagggaattgtcaagctcaacatctacttccaagaatttaactatcgcaccattgaagaatcagcagccaataacatcgtctggctgctctcgaatctgggtggccagtttggcttctggatggggggctctgtgctgtgcctcatcgagtttggggagatcatcatcgactttgtgtggatcaccatcatcaagctggtggccttggccaagagcctacggcagcggcgagcccaagccagctacgctggcccaccgcccaccgtggccgagctggtggaggcccacaccaactttggcttccagcctgacacggccccccgcagccccaacactgggccctaccccagtgagcaggccctgcccatcccaggcaccccgccccccaactatgactccctgcgtctgcagccgctggacgtcatcgagtctgacagtgagggtgatgccatctaaccctgcccctgtccaccccgggtgggtgaaactcactgagcagccaagactgttgcccgaggactcactgtatggtgccctctccaaagggtcgggagggtagctctccaggccagagcttgtgtccttcaacagagaggccagcggcaactggtccgttactggccaagggctctgaagaatcaacggtgctggtacaggatacaggaataaattgtatcttcacctggttcctaccctcgtccctacctgtcctgatcctggtcctgaagacccctcggaacaccctctcctggtggcaggccacttccctcccagtgccagtctccatccaccccagagaggaacaggcgggtgggccatgtggttttctccttcctggccttggctggcctctggggcaggggtggtggagagatggaagggcatcaggtgtagggaccctgccaagtggcacctgatttactctagaaaataaaagtagaaaatactgagaaaaaaaaaaaaaaaaaaa

SEQ ID NO: 428 - DNA, 1195 bp, Homo sapiens
ccgagactcacggtcaagctaaggcgaagagtgggtggctgaagccatactattttatagaattaatggaaagcagaaaagacatcacaaaccaagaagaactttggaaaatgaagcctaggagaaatttagaagaagacgattatttgcataaggacacgggagagaccagcatgctaaaaagacctgtgcttttgcatttgcaccaaacagcccatgctgatgaatttgactgcccttcagaacttcagcacacacaggaactctttccacagtggcacttgccaattaaaatagctgctattatagcatctctgacttttctttacactcttctgagggaagtaattcaccctttagcaacttcccatcaacaatatttttataaaattccaatcctggtcatcaacaaagtcttgccaatggtttccatcactctcttggcattggtttacctgccaggtgtgatagcagcaattgtccaacttcataatggaaccaagtataagaagtttccacattggttggataagtggatgttaacaagaaagcagtttgggcttctcagtttcttttttgctgtactgcatgcaatttatagtctgtcttacccaatgaggcgatcctacagatacaagttgctaaactgggcatatcaacaggtccaacaaaataaagaagatgcctggattgagcatgatgtttggagaatggagatttatgtgtctctgggaattgtgggattggcaatactggctctgttggctgtgacatctattccatctgtgagtgactctttgacatggagagaatttcactatattcagagcaagctaggaattgtttcccttctactgggcacaatacacgcattgatttttgcctggaataagtggatagatataaaacaatttgtatggtatacacctccaacttttatgatagctgttttccttccaattgttgtcctgatatttaaaagcatactattcctgccatgcttgaggaagaagatactgaagattagacatggttgggaagacgtcaccaaaattaacaaaactgagatatgttcccagttgtagaattactgtttacacacatttttgttcaatattgatatattttatcaccaacatttcaagtttgtatttgttaataaaatgattattcaaggaaaaaaaaaaaaaaaaaa

SEQ ID NO: 429 - DNA, 3282 bp, Homo sapiens
gggacagggctgaggatgaggagaaccctggggacccagaagaccgtgccttgcccggaagtcctgcctgtaggcctgaaggacttgccctaacagagcctcaacaactacctggtgattcctacttcagccccttggtgtgagcagcttctcaacatgaactacagcctccacttggccttcgtgtgtctgagtctcttcactgagaggatgtgcatccaggggagtcagttcaacgtcgaggtcggcagaagtgacaagctttccctgcctggctttgagaacctcacagcaggatataacaaatttctcaggcccaattttggtggagaacccgtacagatagcgctgactctggacattgcaagtatctctagcatttcagagagtaacatggactacacagccaccatatacctccgacagcgctggatggaccagcggctggtgtttgaaggcaacaagagcttcactctggatgcccgcctcgtggagttcctctgggtgccagatacttacattgtggagtccaagaagtccttcctccatgaagtcactgtgggaaacaggctcatccgcctcttctccaatggcacggtcctgtatgccctcagaatcacgacaactgttgcatgtaacatggatctgtctaaataccccatggacacacagacatgcaagttgcagctggaaagctggggctatgatggaaatgatgtggagttcacctggctgagagggaacgactctgtgcgtggactggaacacctgcggcttgctcagtacaccatagagcggtatttcaccttagtcaccagatcgcagcaggagacaggaaattacactagattggtcttacagtttgagcttcggaggaatgttctgtatttcattttggaaacctacgttccttccactttcctggtggtgttgtcctgggtttcattttggatctctctcgattcagtccctgcaagaacctgcattggagtgacgaccgtgttatcaatgaccacactgatgatcgggtcccgcacttctcttcccaacaccaactgcttcatcaaggccatcgatgtgtacctggggatctgctttagctttgtgtttggggccttgctagaatatgcagttgctcactacagttccttacagcagatggcagccaaagatagggggacaacaaaggaagtagaagaagtcagtattactaatatcatcaacagctccatctccagctttaaacggaagatcagctttgccagcattgaaatttccagcgacaacgttgactacagtgacttgacaatgaaaaccagcgacaagttcaagtttgtcttccgagaaaagatgggcaggattgttgattatttcacaattcaaaaccccagtaatgttgatcactattccaaactactgtttcctttgatttttatgctagccaatgtattttactgggcatactacatgtatttttgagtcaatgttaaatttcttgcatgccataggtcttcaacaggacaagataatgatgtaaatggtattttaggccaagtgtgcacccacatccaatggtgctacaagtgactgaaataatatttgagtctttctgctcaaagaatgaagctccaaccattgttctaagctgtgtagaagtcctagcattataggatcttgtaatagaaacatcagtccattcctctttcatcttaatcaaggacattcccatggagcccaagattacaaatgtactcagggctgtttattcggtggctccctggtttgcatttacctcatataaagaatgggaaggagaccattgggtaaccctcaagtgtcagaagttgtttctaaagtaactatacatgttttttactaaatctctgcagtgcttataaaatacattgttgcctatttagggagtaacattttctagtttttgtttctggttaaaatgaaatatgggcttatgtcaattcattggaagtcaatgcactaactcaataccaagatgagtttttaaataatgaatattatttaataccacaacagaattatccccaatttccaataagtcctatcattgaaaattcaaatataagtgaagaaaaaattagtagatcaacaatctaaacaaatccctcggttctaagatacaatggattccccatactggaaggactctgaggctttattcccccactatgcatatcttatcattttattattatacacacatccatcctaaactatactaaagcccttttcccatgcatggatggaaatggaagatttttttgtaacttgttctagaagtcttaatatgggctgttgccatgaaggcttgcagaattgagtccattttctagctgcctttattcacatagtgatggggtactaaaagtactgggttgactcagagagtcgctgtcattctgtcattgctgctactctaacactgagcaacactctcccagtggcagatcccctgtatcattccaagaggagcattcatccctttgctctaatgatcaggaatgatgcttattagaaaacaaactgcttgacccaggaacaagtggcttagcttaagtaaacttggctttgctcagatccctgatccttccagctggtctgctctgagtggcttatcccgcatgagcaggagcgtgctggccctgagtactgaactttctgagtaacaatgagacacgttacagaacctatgttcaggttgcgggtgagctgccctctccaaatccagccagagatgcacattcctcggccagtctcagccaacagtaccaaaagtgatttttgagtgtgccagggtaaaggcttccagttcagcctcagttattttagacaatctcgccatctttaatttcttagcttcctgttctaataaatgcacggctttacctttcctgtcagaaataaaccaaggctctaaaagatgatttcccttctgtaactccctagagccacaggttctcattccttttcccattatacttctcacaattcagtttctatgagtttgatcacctgatttttttaacaaaatatttctaacgggaatgggtgggagtgctggtgaaaagagatgaaatgtggttgtatgagccaatcatatttgtgattttttaaaaaaagtttaaaaggaaatatctgttctgaaaccccacttaagcattgtttttatataaaaacaatgataaagatgtgaactgtgaaataaatataccatattagctacccaccaaaaaaaaaaaaaaaaaa

SEQ ID NO: 430 - DNA, 440 bp, Homo sapiens
ttttttttttttttttttttttttttttggagttaaaagttatttattgagggaaaactagggatggttcacttgatccctccccaaatccatcctcaaatgcacccgagcaacaagaaaactagctcagtcagtgagacgttcagccttatgcaaaggctcaggagccctccaaaatgagggtaagggacatctttttagaggtgcaaaggagcgattatgattcagggtgacagcatgctaactgcagggtcaataggcaaatgggattcataagcagaatggagtagggtgttcagtatccagtggccagctcctcaagggcatggctgtggaccacattacttctgcttggtcttctgctgggctggtgctggagtgaccgttgaagggcagggctcaggcaccttgggctggcagggctctggaatcttgggctg

SEQ ID NO: 431 - DNA, 1576 bp, Homo sapiens
gctgaagcaaaagatttgcatttaaggagagaaatacaccctgaaatttgagtttgaaagattagaacatagagggtctctacagtgtttttctgcaacaccaagtagtcaaatctatttatagaaactctgattacaacagaaattttaaaatgaaattttccacatcggtattttgtaggaaagctcttataatcaatgcttaagctgctttttgaggcttttcttgtacagaggttgcagccaattacattttaattggtaggctgctgaataatgtttttgtatgttttaaaataatatttattttaataggttttttaacattatgcaaatcccaataaagaactgacacgttccataggccattgactgggaaattttgtgaaacacagcctaaatacacagtttttacaccaactaatttgtcttgcctttaaaactgattataactcttctttaagtacaacttttataaagaaaaaatacaacactaagactgtatgttctgtaaattatagtgtgatgacccatgcagaaccgctgtctgaagcttactcagcgattcatagccatctccagccatgttttatcaaatcacacactaaaaataaatggaaatgctacagtgaaaaaccaaaagttacagagcaacataagtaaaatgactaggcagtttcttagtaacatgtttgaaatgggaaaggtgactgactgcctttcaccagagtcttagctgtttcacgttcactattttaggttaattttcttgggaaatcaatttgaatattcccccctgtccttttgcattaaaggacgaaaatatatgttgagagtttgacagactttttaaatatgcctctttcccaattttatgtatttttggttctgcgcacacagatttatcaatgaagtacatttgcctctggctttatcacaaggaaaaaggaatcaaacattgaacacaaatgtgttccaaaccagtcttgtccatcttgtcacttttatgtgactgctcctctgaaccagaaggggcacgatagaaggccataggaatgaaagtaaatcattcaggtgaagtgagaaattcttccatatacagagtgaaaatgtgtgatttcattcctgccttcctttaaacgttgtcttgatctctgcctagtagtagttgagccctcagtcgcccaaacatgaggagagacccaactccagcagccagaatttagtatttacatttgccttcccaagttgagaatagaatgtggtgttctgtgctttctgtttttattattccaaaatatttttttaaagaagtgttatttttcaacagattcataaattagttcctgatgtacggtaaattaaaactcccactgtgtcagtcaaactgagatgtgctcatttcataaccactcatttctagtctgtcagagctgcactggtggcttattgctggtttttaaaggtgtttttaacttacatgtaacatgtttaggacatgttttttttttctaatttgtgtgtctttacaactgattaaacagtagtttaaaaataaaaaaaaaaaaaaaaaaaa

SEQ ID NO: 432 - DNA, 584 bp, Homo sapiens
  misc_feature (262)..(262): "n" = a, t, g, or c.
  misc_feature (574)..(574): "n" = a, t, g, or c.
atcaaagtttttttgtgtcaatgccaaagcaacgaagaattcccctttttccttcactattgacagcttcagtttctgtacttactgtgtcatcctatccattcccttccctgagcctggactgctcttccaagggagactaggagtgaagggaggagtcctcccaaagttaccctttaagcttgataattagctccatagccatgctaaagcatgactgtagatccccaagtccctgacacattttcttctaagaaaactnttagccaagtaaagacgtaagccctgaagatggcaaaaggtgtcataatctcccaaagtcatctgtatagatgcttcatttaaccctttttcttttgcagacaaagggttaaaaatctcttctttctacctatatctttaaagagggattgacaagcccaaatttccttttatgaaaagacccaaggtttctggccaacaattcacttttttcagtctcttaggtcctcttgcatgcctgagaatattgagtattcggaatctcctaccagcctttggtaaatgaccctaccaggtggaatagtttgagctntatctgctct

SEQ ID NO: 433 - DNA, 5879 bp, Homo sapiens
ggcaggtctcgctctcggcaccctcccggcgcccgcgttctcctggccctgcccggcatcccgatggccgccgctgggccccggcgctccgtgcgcggagccgtctgcctgcatctgctgctgaccctcgtgatcttcagtcgtgatggtgaagcctgcaaaaaggtgatacttaatgtaccttctaaactagaggcagacaaaataattggcagagttaatttggaagagtgcttcaggtctgcagacctcatccggtcaagtgatcctgatttcagagttctaaatgatgggtcagtgtacacagccagggctgttgcgctgtctgataagaaaagatcatttaccatatggctttctgacaaaaggaaacagacacagaaagaggttactgtgctgctagaacatcagaagaaggtatcgaagacaagacacactagagaaactgttctcaggcgtgccaagaggagatgggcacctattccttgctctatgcaagagaattccttgggccctttcccattgtttcttcaacaagttgaatctgatgcagcacagaactatactgtcttctactcaataagtggacgtggagttgataaagaacctttaaatttgttttatatagaaagagacactggaaatctattttgcactcggcctgtggatcgtgaagaatatgatgtttttgatttgattgcttatgcgtcaactgcagatggatattcagcagatctgcccctcccactacccatcagggtagaggatgaaaatgacaaccaccctgttttcacagaagcaatttataattttgaagttttggaaagtagtagacctggtactacagtgggggtggtttgtgccacagacagagatgaaccggacacaatgcatacgcgcctgaaatacagcattttgcagcagacaccaaggtcacctgggctcttttctgtgcatcccagcacaggcgtaatcaccacagtctctcattatttggacagagaggttgtagacaagtactcattgataatgaaagtacaagacatggatggccagttttttggattgataggcacatcaacttgtatcataacagtaacagattcaaatgataatgcacccactttcagacaaaatgcttatgaagcatttgtagaggaaaatgcattcaatgtggaaatcttacgaatacctatagaagataaggatttaattaacactgccaattggagagtcaattttaccattttaaagggaaatgaaaatggacatttcaaaatcagcacagacaaagaaactaatgaaggtgttctttctgttgtaaagccactgaattatgaagaaaaccgtcaagtgaacctggaaattggagtaaacaatgaagcgccatttgctagagatattcccagagtgacagccttgaacagagccttggttacagttcatgtgagggatctggatgaggggcctgaatgcactcctgcagcccaatatgtgcggattaaagaaaacttagcagtggggtcaaagatcaacggctataaggcatatgaccccgaaaatagaaatggcaatggtttaaggtacaaaaaattgcatgatcctaaaggttggatcaccattgatgaaatttcagggtcaatcataacttccaaaatcctggatagggaggttgaaactcccaaaaatgagttgtataatattacagtcctggcaatagacaaagatgatagatcatgtactggaacacttgctgtgaacattgaagatgtaaatgataatccaccagaaatacttcaagaatatgtagtcatttgcaaaccaaaaatggggtataccgacattttagctgttgatcctgatgaacctgtccatggagctccattttatttcagtttgcccaatacttctccagaaatcagtagactgtggagcctcaccaaagttaatgatacagctgcccgtctttcatatcagaaaaatgctggatttcaagaatataccattcctattactgtaaaagacagggccggccaagctgcaacaaaattattgagagttaatctgtgtgaatgtactcatccaactcagtgtcgtgcgacttcaaggagtacaggagtaatacttggaaaatgggcaatccttgcaatattactgggtatagcactgctcttttctgtattgctaactttagtatgtggagtttttggtgcaactaaagggaaacgttttcctgaagatttagcacagcaaaacttaattatatcaaacacagaagcacctggagacgatagagtgtgctctgccaatggatttatgacccaaactaccaacaactctagccaaggtttttgtggtactatgggatcaggaatgaaaaatggagggcaggaaaccattgaaatgatgaaaggaggaaaccagaccttggaatcctgccggggggctgggcatcatcataccctggactcctgcaggggaggacacacggaggtggacaactgcagatacacttactcggagtggcacagttttactcaaccccgtctcggtgaaaaattgcatcgatgtaatcagaatgaagaccgcatgccatcccaagattatgtcctcacttataactatgagggaagaggatctccagctggttctgtgggctgctgcagtgaaaagcaggaagaagatggccttgactttttaaataatttggaacccaaatttattacattagcagaagcatgcacaaagagataatgtcacagtgctacaattaggtctttgtcagacattctggaggtttccaaaaataatattgtaaagttcaatttcaacatgtatgtatatgatgatttttttctcaattttgaattatgctactcaccaatttatatttttaaagccagttgttgcttatcttttccaaaaagtgaaaaatgttaaaacagacaactggtaaatctcaaactccagcactggaattaaggtctctaaagcatctgctcttttttttttttacggatattttagtaataaatatgctggataaatattagtccaacaatagctaagttatgctaatatcacattattatgtattcactttaagtgatagtttaaaaaataaacaagaaatattgagtatcactatgtgaagaaagttttggaaaagaaacaatgaagactgaattaaattaaaaatgttgcagctcataaagaattgggactcacccctactgcactaccaaattcatttgactttggaggcaaaatgtgttgaagtgccctatgaagtagcaattttctataggaatatagttggaaataaatgtgtgtgtgtatattattattaatcaatgcaatatttaaaatgaaatgagaacaaagaggaaaatggtaaaaacttgaaatgaggctggggtatagtttgtcctacaatagaaaaaagagagagcttcctaggcctgggctcttaaatgctgcattataactgagtctatgaggaaatagttcctgtccaatttgtgtaatttgtttaaaattgtaaataaattaaacttttctggtttctgtgggaaggaaatagggaatccaatggaacagtagctttgctttgcagtctgtttcaagatttctgcatccacaagttagtagcaaactggggaatactcgctgcagctggggttccctgctttttggtagcaagggtccagagatgaggtgtttttttcggggagctaataacaaaaacattttaaaacttacctttactgaagttaaatcctctattgctgtttctattctctcttatagtgaccaacatctttttaatttagatccaaataaccatgtcctcctagagtttagaggctagagggagctgaggggaggatcttactgaaagcaccctggggagattgattgtccttaaacctaagccccacaaacttgacacctgatcaggtctgggagctacaaaatttcatttttctcctcactgcccttcttctgagtggcattggcctgaatcaaggaaagccaggccttgtgggcccccttctttcggctttctgctaaagcaacacctccagcagagattcccttaagtgactccaggttttccaccatccttcagcgtgaattaatttttaatcagtttgctttctccagagaaattttaaaataatagaagaaatagaaattttgaatgtataaaagaaaaagatcaagttgtcattttagaacagagggaactttgggagaaagcagcccaagtaggttatttgtacagtcagagggcaacaggaagatgcaggccttcaagggcaaggagaggccacaaggaatatgggtgggagtaaaagcaacatcgtctgcttcatactttttcctaggcttggcactgccttttcctttctcaggccaatggcaactgccatttgagtccggtgagggatcagccaacctcttctctatggctcaccttatttggagtgagaaatcaaggagacagagctgactgcatgatgagtctgaaggcatttgcaggatgagcctgaactggttgtgcagaacaaacaaggcattcatgggaattgttgtattccttctgcagccctccttctgggcactaagaaggtctatgaattaaatgcctatctaaaattctgatttattcctacattttctgttttctaatttgaccctaaaatctatgtgttttagacttagactttttattgccccccccccctttttttttgagacggagtctcgctctgacgcacaggctggagtgcagtggctccgatctctgctcactgaaagctccgcctcccgggttcatgccattctcctgcctcagcctcctgagtagctgggactacaggcgcccaccaccacgcccggctaattttttgtatttttaatagagacggggtttcactgtgttagccaggatggtctcgatctcctgacctcgtgatccgcctgcctcggcctcccaaagtgctgggattacaggcatgacccaccgctcccggccttgttttccgtttaaagtcgtcttcttttaatgtaatcattttgaacatgtgtgaaagttgatcatacgaattggatcaatcttgaaatactcaaccaaaagacagtcgagaagccagggggagaaagaactcagggcacaaaatattggtctgagaatggaattctctgtaagcctagttgctgaaatttcctgctgtaaccagaagccagttttatctaacggctactgaaacacccactgtgttttgctcactccctcactcaccgatcaaaacctgctacctccccaagactttactagtgccgataaactttctcaaagagcaaccagtatcacttccctgtttataaaacctctaaccatctctttgttctttgaacatgctgaaaaccacctggtctgcatgtatgcccgaatttgtaattcttttctctcaaatgaaaatttaattttagggattcatttctatattttcacatatgtagtattattatttccttatatgtgtaaggtgaaatttatggtatttgagtgtgcaagaaaatatatttttaaagctttcatttttcccccagtgaatgatttagaattttttatgtaaatatacagaatgttttttcttacttttataaggaagcagctgtctaaaatgcagtggggtttgttttgcaatgttttaaacagagttttagtattgctattaaaagaagttactttgcttttaaagaaacttggctgcttaaaataagcaaaaattggatgcataaagtaatatttacagatgtggggagatgtaataaaacaatattaacttggaaaaaaaaaaaaaaaaaaa

SEQ ID NO: 434 - DNA, 5920 bp, Homo sapiens
ggcaggtctcgctctcggcaccctcccggcgcccgcgttctcctggccctgcccggcatcccgatggccgccgctgggccccggcgctccgtgcgcggagccgtctgcctgcatctgctgctgaccctcgtgatcttcagtcgtgatggtgaagcctgcaaaaaggtgatacttaatgtaccttctaaactagaggcagacaaaataattggcagagttaatttggaagagtgcttcaggtctgcagacctcatccggtcaagtgatcctgatttcagagttctaaatgatgggtcagtgtacacagccagggctgttgcgctgtctgataagaaaagatcatttaccatatggctttctgacaaaaggaaacagacacagaaagaggttactgtgctgctagaacatcagaagaaggtatcgaagacaagacacactagagaaactgttctcaggcgtgccaagaggagatgggcacctattccttgctctatgcaagagaattccttgggccctttcccattgtttcttcaacaagttgaatctgatgcagcacagaactatactgtcttctactcaataagtggacgtggagttgataaagaacctttaaatttgttttatatagaaagagacactggaaatctattttgcactcggcctgtggatcgtgaagaatatgatgtttttgatttgattgcttatgcgtcaactgcagatggatattcagcagatctgcccctcccactacccatcagggtagaggatgaaaatgacaaccaccctgttttcacagaagcaatttataattttgaagttttggaaagtagtagacctggtactacagtgggggtggtttgtgccacagacagagatgaaccggacacaatgcatacgcgcctgaaatacagcattttgcagcagacaccaaggtcacctgggctcttttctgtgcatcccagcacaggcgtaatcaccacagtctctcattatttggacagagaggttgtagacaagtactcattgataatgaaagtacaagacatggatggccagttttttggattgataggcacatcaacttgtatcataacagtaacagattcaaatgataatgcacccactttcagacaaaatgcttatgaagcatttgtagaggaaaatgcattcaatgtggaaatcttacgaatacctatagaagataaggatttaattaacactgccaattggagagtcaattttaccattttaaagggaaatgaaaatggacatttcaaaatcagcacagacaaagaaactaatgaaggtgttctttctgttgtaaagccactgaattatgaagaaaaccgtcaagtgaacctggaaattggagtaaacaatgaagcgccatttgctagagatattcccagagtgacagccttgaacagagccttggttacagttcatgtgagggatctggatgaggggcctgaatgcactcctgcagcccaatatgtgcggattaaagaaaacttagcagtggggtcaaagatcaacggctataaggcatatgaccccgaaaatagaaatggcaatggtttaaggtacaaaaaattgcatgatcctaaaggttggatcaccattgatgaaatttcagggtcaatcataacttccaaaatcctggatagggaggttgaaactcccaaaaatgagttgtataatattacagtcctggcaatagacaaagatgatagatcatgtactggaacacttgctgtgaacattgaagatgtaaatgataatccaccagaaatacttcaagaatatgtagtcatttgcaaaccaaaaatggggtataccgacattttagctgttgatcctgatgaacctgtccatggagctccattttatttcagtttgcccaatacttctccagaaatcagtagactgtggagcctcaccaaagttaatgatacagctgcccgtctttcatatcagaaaaatgctggatttcaagaatataccattcctattactgtaaaagacagggccggccaagctgcaacaaaattattgagagttaatctgtgtgaatgtactcatccaactcagtgtcgtgcgacttcaaggagtacaggagtaatacttggaaaatgggcaatccttgcaatattactgggtatagcactgctcttttctgtattgctaactttagtatgtggagtttttggtgcaactaaagggaaacgttttcctgaagatttagcacagcaaaacttaattatatcaaacacagaagcacctggagacgatagagtgtgctctgccaatggatttatgacccaaactaccaacaactctagccaaggtttttgtggtactatgggatcaggaatgaaaaatggagggcaggaaaccattgaaatgatgaaaggaggaaaccagaccttggaatcctgccggggggctgggcatcatcataccctggactcctgcaggggaggacacacggaggtggacaactgcagatacacttactcggagtggcacagttttactcaaccccgtctcggtgaagaatccattagaggacacactggttaaaaattaaacataaaagaaattgcatcgatgtaatcagaatgaagaccgcatgccatcccaagattatgtcctcacttataactatgagggaagaggatctccagctggttctgtgggctgctgcagtgaaaagcaggaagaagatggccttgactttttaaataatttggaacccaaatttattacattagcagaagcatgcacaaagagataatgtcacagtgctacaattaggtctttgtcagacattctggaggtttccaaaaataatattgtaaagttcaatttcaacatgtatgtatatgatgatttttttctcaattttgaattatgctactcaccaatttatatttttaaagccagttgttgcttatcttttccaaaaagtgaaaaatgttaaaacagacaactggtaaatctcaaactccagcactggaattaaggtctctaaagcatctgctcttttttttttttacggatattttagtaataaatatgctggataaatattagtccaacaatagctaagttatgctaatatcacattattatgtattcactttaagtgatagtttaaaaaataaacaagaaatattgagtatcactatgtgaagaaagttttggaaaagaaacaatgaagactgaattaaattaaaaatgttgcagctcataaagaattgggactcacccctactgcactaccaaattcatttgactttggaggcaaaatgtgttgaagtgccctatgaagtagcaattttctataggaatatagttggaaataaatgtgtgtgtgtatattattattaatcaatgcaatatttaaaatgaaatgagaacaaagaggaaaatggtaaaaacttgaaatgaggctggggtatagtttgtcctacaatagaaaaaagagagagcttcctaggcctgggctcttaaatgctgcattataactgagtctatgaggaaatagttcctgtccaatttgtgtaatttgtttaaaattgtaaataaattaaacttttctggtttctgtgggaaggaaatagggaatccaatggaacagtagctttgctttgcagtctgtttcaagatttctgcatccacaagttagtagcaaactggggaatactcgctgcagctggggttccctgctttttggtagcaagggtccagagatgaggtgtttttttcggggagctaataacaaaaacattttaaaacttacctttactgaagttaaatcctctattgctgtttctattctctcttatagtgaccaacatctttttaatttagatccaaataaccatgtcctcctagagtttagaggctagagggagctgaggggaggatcttactgaaagcaccctggggagattgattgtccttaaacctaagccccacaaacttgacacctgatcaggtctgggagctacaaaatttcatttttctcctcactgcccttcttctgagtggcattggcctgaatcaaggaaagccaggccttgtgggcccccttctttcggctttctgctaaagcaacacctccagcagagattcccttaagtgactccaggttttccaccatccttcagcgtgaattaatttttaatcagtttgctttctccagagaaattttaaaataatagaagaaatagaaattttgaatgtataaaagaaaaagatcaagttgtcattttagaacagagggaactttgggagaaagcagcccaagtaggttatttgtacagtcagagggcaacaggaagatgcaggccttcaagggcaaggagaggccacaaggaatatgggtgggagtaaaagcaacatcgtctgcttcatactttttcctaggcttggcactgccttttcctttctcaggccaatggcaactgccatttgagtccggtgagggatcagccaacctcttctctatggctcaccttatttggagtgagaaatcaaggagacagagctgactgcatgatgagtctgaaggcatttgcaggatgagcctgaactggttgtgcagaacaaacaaggcattcatgggaattgttgtattccttctgcagccctccttctgggcactaagaaggtctatgaattaaatgcctatctaaaattctgatttattcctacattttctgttttctaatttgaccctaaaatctatgtgttttagacttagactttttattgccccccccccctttttttttgagacggagtctcgctctgacgcacaggctggagtgcagtggctccgatctctgctcactgaaagctccgcctcccgggttcatgccattctcctgcctcagcctcctgagtagctgggactacaggcgcccaccaccacgcccggctaattttttgtatttttaatagagacggggtttcactgtgttagccaggatggtctcgatctcctgacctcgtgatccgcctgcctcggcctcccaaagtgctgggattacaggcatgacccaccgctcccggccttgttttccgtttaaagtcgtcttcttttaatgtaatcattttgaacatgtgtgaaagttgatcatacgaattggatcaatcttgaaatactcaaccaaaagacagtcgagaagccagggggagaaagaactcagggcacaaaatattggtctgagaatggaattctctgtaagcctagttgctgaaatttcctgctgtaaccagaagccagttttatctaacggctactgaaacacccactgtgttttgctcactcccactcaccgatcaaaacctgctacctccccaagactttactagtgccgataaactttctcaaagagcaaccagtatcacttccctgtttataaaacctctaaccatctctttgttctttgaacatgctgaaaaccacctggtctgcatgtatgcccgaatttgtaattcttttctctcaaatgaaaatttaattttagggattcatttctatattttcacatatgtagtattattatttccttatatgtgtaaggtgaaatttatggtatttgagtgtgcaagaaaatatatttttaaagctttcatttttcccccagtgaatgatttagaattttttatgtaaatatacagaatgttttttcttacttttataaggaagcagctgtctaaaatgcagtggggtttgttttgcaatgttttaaacagagttttagtattgctattaaaagaagttactttgcttttaaagaaacttggctgcttaaaataagcaaaaattggatgcataaagtaatatttacagatgtggggagatgtaataaaacaatattaacttggaaaaaaaaaaaaaaaaaaa

SEQ ID NO: 435 - DNA, 3485 bp, Homo sapiens
tccagctgggtagccgggggagcgcgcgtgggggctccgcgagtcgctcgcccttggtttctggggaagcctgggggacgcggctgtggcggaggcgccctgggactcaggtcgcctggagcgtggcacgcagagccccaggcgcggagctgaggccgcgcggccgcgcttggccccagcgggcgtgggactgagcagtctgctgccccccgacatgtgacccagccccgccgcccatgcgggctcccggccgcccggccctgcggccgctgccgctgccgccgctgctgctgttgctcctggcggcgccttggggacgggcagttccctgtgtctctggtggtttgcctaaacctgcaaacatcaccttcttatccatcaacatgaagaatgtcctacaatggactccaccagagggtcttcaaggagttaaagttacttacactgtgcagtatttcatatatgggcaaaagaaatggctgaataaatcagaatgcagaaatatcaatagaacctactgtgatctttctgctgaaacttctgactacgaacaccagtattatgccaaagttaaggccatttggggaacaaagtgttccaaatgggctgaaagtggacggttctatccttttttagaaacacaaattggcccaccagaggtggcactgactacagatgagaagtccatttctgttgtcctgacagctccagagaagtggaagagaaatccagaagaccttcctgtttccatgcaacaaatatactccaatctgaagtataacgtgtctgtgttgaatactaaatcaaacagaacgtggtcccagtgtgtgaccaaccacacgctggtgctcacctggctggagccgaacactctttactgcgtacacgtggagtccttcgtcccagggccccctcgccgtgctcagccttctgagaagcagtgtgccaggactttgaaagatcaatcatcagagttcaaggctaaaatcatcttctggtatgttttgcccatatctattaccgtgtttcttttttctgtgatgggctattccatctaccgatatatccacgttggcaaagagaaacacccagcaaatttgattttgatttatggaaatgaatttgacaaaagattctttgtgcctgctgaaaaaatcgtgattaactttatcaccctcaatatctcggatgattctaaaatttctcatcaggatatgagtttactgggaaaaagcagtgatgtatccagccttaatgatcctcagcccagcgggaacctgaggccccctcaggaggaagaggaggtgaaacatttagggtatgcttcgcatttgatggaaattttttgtgactctgaagaaaacacggaaggtacttctttcacccagcaagagtccctcagcagaacaatacccccggataaaacagtcattgaatatgaatatgatgtcagaaccactgacatttgtgcggggcctgaagagcaggagctcagtttgcaggaggaggtgtccacacaaggaacattattggagtcgcaggcagcgttggcagtcttgggcccgcaaacgttacagtactcatacacccctcagctccaagacttagaccccctggcgcaggagcacacagactcggaggaggggccggaggaagagccatcgacgaccctggtcgactgggatccccaaactggcaggctgtgtattccttcgctgtccagcttcgaccaggattcagagggctgcgagccttctgagggggatgggctcggagaggagggtcttctatctagactctatgaggagccggctccagacaggccaccaggagaaaatgaaacctatctcatgcaattcatggaggaatgggggttatatgtgcagatggaaaactgatgccaacacttccttttgccttttgtttcctgtgcaaacaagtgagtcacccctttgatcccagccataaagtacctgggatgaaagaagttttttccagtttgtcagtgtctgtgagaattacttatttcttttctctattctcatagcacgtgtgtgattggttcatgcatgtaggtctcttaacaatgatggtgggcctctggagtccaggggctggccggttgttctatgcagagaaagcagtcaataaatgtttgccagactgggtgcagaatttattcaggtgggtgtactctggcctcttggttcattattttcaaacaagcacacttgtacaattattttctgggtacttcccatatgcacatagcactgtaaaaaatatttcccaaagatcactcattttataaataccactttttcagaattgggtttattgcgagcaggaggagatacttaaaacatgcacatataccaggttggtggtaagttggtcacatgtgaaaacctcaactatttaatcatcatgattcatattttgagtgaatacatcaggcacagaccttcatgatatcacacactcttggctactttaagaggccatctttaatactttatgagtagttctggagtgtaaacataaacgagtattcttttgtagtcagaaaagtgtcctctcaataatttagtaggggcttattgtctctcaaaactaacctaaaagaaaatgacacattttataatagaatattacatttatttctggaagtgtgttttcaaaaagatatttacatagtctgtaaactagaaagtgttaggtaaagctctaggttactgtgttactattataatattaaacattcgaataggcagtcgttcaaagactctttggaatatctatgaatgaatatcctctattcttataatattaaaacccataagtaaatataggacatacaagagaaatgagttaaatgactatgtaagggagagtttattaaaatttgatgaaatttactgtaggaactaaactatgccataaaacaatagctttctagttcatttccagtaactgttcccatctcctttaccacttgttaagaaaattaaattcttcagtcacgctgctttaaaatgggacaaaatctattaagttgaaccatatataattgtggatatttggctgtttttaatctgacaagcagtaacttcatatggtttgccttaatatatatttgttttagtcatgaactcataatccattgatgctctttcatgagaagagatatgacccatatttccttattgatattattggtacaggcagacaaccctggtaggagagatggattctggggtcatgacctttcgtgattatccgcaaatgcaaacagtttcagatctaatggtttaatttagggagtaattatattaatcagagtgttctgttattctcaatctttatagaaacgattctgctggttttgaagaacagatgtattacactaactgtaaaagtagttcaagagtgagaaagaataaattgttattaagagcaaaagaaaaataaagtgattgatgata

SEQ ID NO: 436 - DNA, 2618 bp, Homo sapiens
gcggggctggcacccgggccgaggctctgattctggggggaggccgactccaccctggctggaggaactgggtgctcctgcccgctggcccctcgcgcgtgaggatctatctcaggctaagaaatggcatttcaaaaggcagtgaaagggacgattcttgttggaggaggtgctcttgcaactgttttaggactttctcagtttgctcattacagaaggaaacaaatgaacctggcctatgttaaagcagcagactgcatttcagaaccagttaacagggagcctccttccagagaagctcagctactgactttgcaaaacacatctgaatttgatatccttgttattggaggaggagcaacaggaagtggctgtgcgctagatgctgtcaccagaggactaaaaacagcccttgtagaaagagatgatttctcatcagggaccagcagcagaagcactaaattgatccatggtggtgtgagatatctgcagaaggccatcatgaagttggatattgagcagtataggatggtaaaagaagcccttcatgagcgtgccaacctgctagaaattgctccccatttatcagctccattgcctataatgcttccagtttacaagtggtggcagttaccttactactgggtaggaatcaagctgtatgatttggttgcaggaagcaattgcctaaaaagcagttatgtcctcagcaaatcaagagcccttgaacatttcccaatgctccagaaggacaaactggtaggagcaattgtctactatgacggacaacataacgatgcacggatgaaccttgccattgctctgactgctgccaggtatggggctgccacagccaattacatggaggtagtgagcttgctcaagaagacagacccccagacagggaaagtgcatgtgagcggcgcacggtgcaaggatgtcctcacagggcaggaatttgacgtgagagccaaatgtgttatcaatgccacgggacctttcacggactctgtgcgcaaaatggatgataaagacgcagcagctatctgccagccaagtgctggtgtccatattgtgatgcctggttattacagcccagagagcatgggacttcttgacccagcgaccagtgatgggcgagttattttcttcttaccctggcaaaagatgacgatcgctggcactactgatactccaactgatgttacacaccatccaattccttcagaagaagatatcaacttcattttgaatgaagtgcgtaattacctgagttgtgatgttgaagtgagaagaggggatgtcctggcagcatggagtggaatccgtcctcttgttacagaccccaaatctgcagatactcagtctatctcccgaaatcatgttgttgatatcagtgagagtggccttattactatagcaggtggaaagtggacaacttatcggtctatggcagaagataccataaatgctgctgtcaaaactcataatttaaaagcaggaccaagtagaacagttgggcttttccttcaagggggtaaagattggagccccacactctacattaggcttgtgcaggattatggacttgaaagcgaggtggcacagcatcttgccgccacctatggtgataaggcctttgaggtggccaaaatggcaagtgtgactggcaaaaggtggcctattgttggagtacatcttgtgtcagaatttccatatattgaagcagaggtgaaatatgggattaaggagtatgcctgcactgctgtggatatgatttcacgtcgtactcgcctggcctttctaaatgtccaggcagcagaggaagccctacccaggattgttgaactgatgggcagggaactgaattgggatgattataagaagcaggaacaacttgaaacagccaggaagtttctatattatgaaatgggctataaatctcgatcagaacagttaacagatcgctctgaaattagcctactgccttcagacattgacaggtataagaagagatttcataagtttgatgcagaccagaaaggctttattaccattgttgatgttcagcgtgtattagagagtatcaatgtccaaatggatgaaaatacactccatgaaattctaaatgaagttgatttgaataaaaatggacaggttgaactcaatgaatttttgcagctgatgagtgctattcaaaaaggaagggtatctggaagccggcttgctatactaatgaaaactgcagaagagaacctcgacagaagagttccaattccagtggaccgtagttgtggaggattgtgagtctgggcagtaaatccacagccaacaaacatagaaacgacaaatcaccatgtaacaaccagagatgactgaaaccactctgaaataatgaatgtggatagctgccttttttaacactagaaaacattccaaaactttaaggtgttggtgtatttgccagctttatttgctgtactttatttgtatttgccattcagtctagcttttaagtatatttttttctttttctcattttcaatgcacattagttttgcatctgttttgtgacctgttagatgtgacacattctctttttgtttattcccttattc

SEQ ID NO: 437 - DNA, 4646 bp, Homo sapiens
gggaggcggtggccgaggcccaggcggtggcggcggcggcccaggaggcggcggacggggagctgcgggagcaggcccgggcctggctctctagcggccgcctggctgcagcatgcgcgcccgccgggggctgctgcggctgccgcgccgctcgctgctcgccgcgctcttcttcttttctctctcgtcctcgctgctgtacttcgtctatgtggcgcccggcatagtgaacacctacctcttcatgatgcaagcccaaggcattctgatccgggacaacgtgagaacaatcggtgctcaggtttatgagcaggtgcttcggagtgcttatgccaagaggaacagcagtgtaaatgactcagattatcctcttgacttgaaccacagtgaaaccttcctgcaaactacaacatttcttcctgaagacttcacctactttgcaaaccatacctgccctgaaagactcccttccatgaagggcccaatagacataaacatgagtgaaattggaatggattacattcatgaactcttctccaaagacccaaccatcaagctcggaggtcactggaagccttctgattgcatgcctcggtggaaggtggcgatccttatccccttccggaaccgccacgagcacctcccagtcctgttcagacacctgcttcccatgctccagcgccagcgcttgcagtttgcattttatgtggttgaacaagttggtacccaaccctttaatcgagccatgcttttcaacgttggctttcaagaggcaatgaaagacttggattgggactgtttgatttttcatgatgtagatcacataccggaaagtgatcgcaactattatggatgtggacagatgccgaggcattttgcaaccaaattggataagtatatgtatctgcttccttataccgagttctttggcggagtgagtggcttaacagtggaacaatttcggaaaatcaatggctttcctaatgctttctggggttggggtggagaagatgacgacctctggaacagagtacagaatgcaggctattctgtgagccggccagagggtgacacaggaaagtacaagtccattcctcatcaccatcgaggagaagtccagtttcttggaaggtatgctctgctgaggaagtcaaaagaacggcaagggctggatggcctcaacaacctgaactactttgcaaacatcacatacgacgccttgtataaaaacataactgtcaacctgacacccgagctggctcaggtgaacgagtactgagaggagagaatgtacgtttgctttacccaccgccaccaagaaagcagtccgatgagatttttttttggaggggggagggtctacacagcaagagaacagaaatactgtgtctcatgaaggatcacagagttcagggggaaaatgtgacagcacacgcacaaacgccttcactggatcagccgctggaactgagggagtgagcttggggacttccttcgtcagcactggctttctgttttcacaagacagacgtctgtcccgctgctctctccccatctcctaccccacatcctgtcttagccgcagtctccagaacccatgatgaactgtgatctgccgtggtcctgccgtggtcctgccgtggagcctgtccctacacatgaccttggagcctcttggccttcagagcagaggcaaacccaccacagggcagctgcgttttaggaagagcaaatgaaactccacaccattcttctagatctctggtgttctctttggtttcatttttttaaaaaattaccttctttgggtggggattgagggtggaggggagggtgtttgggaaagataaatagacataaatatataacaatcacttcttgaagaagtataattgtaaataagccatgtaaaatgcctttttaaaatttaattttctagctggctccaattcaaattgaggatttatgtattaggccacttacttggttggcaagtgcaggaactcagttaaaatgcagttgaagaatgtcatctcccgaattgctgtcactttggcgagggagtggatatagggcatgtcacaaaagaacaaaataacccgacctttattgctgggagctggcttctgtccctttcttcccccccccacgagtcttgcccttgacttctgctctggattcactcttccctgtcggccgcgcatgtgctcatcccactctccgctaagcgggaggctgctgttagagcaggctgcttcctgcctaaagcaggcccttcggggctcgctgcacacacatctctggctctccaggcttcgtgttctgtcttttcatcagcatggcggggcggggggcggggggcgggggtgtgtatgggaatccctccccctcttactttttctcttgtggaacttggccacagtttctgaacaatgtgcctacattaccagctggcttcagtgattcctctgtgtccctttttggtttctggaaagattctttgtcaacattagtaactgatacatagaaccaaggagcactcaaatagggagccaggagccagggagctggtgacacttgtgtgctgtggggcagctgggatccaggtaagaccggattgaagctttgaaattagactaacaaagctccagacagcaagagcccaggtgcactgctcacacccccacctgcattttgaagtcatattattttttgttttgttttttaagacggtctggctctgtcgcctaagctggagtgtggtggcacgatcacagctcactgcagcctccatctcctaggctcaagccattttcccacctcagcctcccgagtagctgggactacaggtgcacaccaccacacctggctaattttttgtatttttagtagagacaggggtttcttccatgttgcccaggctggtctcgaactcctggactcaagcaatccgcccaccttgacttcccaaagtgctgggattatgggcgggtgtgagccattgcgcccagccttgaagtcatgttctaaattgtatttgaatttgtgcctctttgtttttccccaaaccaaagccctcaaattgtagtctctgtcggcttctgcagaattctggaaaatgccagttttcctcccccgcccttgttttccataaaacatatttatatattgtgatgaggagtactttctgaagagtacttcgtatttttttttaattgccttgtttgccttcaacttccttgattttcatagtttacatgggtgtgtgtaggggtgtgtgtgtgtatgtgtgtgggttagggcttttttcgttgcatgtgatggttctgtggacatatgatccccacaaactgtgggagtgattggccaggccttgttttgtttgtttgtttgtttgtgtttttgttcttttgaagaatagagtggtatttagaaaataaattgcattgcaaagctcttatcggctcatatgagagagcaggttcctgcccttgaaaatgccggtaagctatagcatatgttttttaagacttaagcatttcatgctttaaaataccttcacaagtgaacattacacacagaagttcatttggttttcctttgttttatggtgcatatagcaataaagacccccctccaccctgcaacccccatcccccaccgggcctttgtccctgccttggcttttctccccttctcattctcctctcccctttcctcactgaaggctgtgagttgctttcaatgtgacaacactatgatgtcatttggaaggatttgccaggacagactgattctgagtcctgggtgccgtatgtgtatgcggcagtgttgtcaggcgatcttgtttgaagctctatgttgccataattaccatcaagtacacactgttggcaaaaggctaacacctgactttagaaaatgctgatttgagaacaaaaggaaaggtcttttttcactgcttaaagtggggtcactttgatacctttgcggtcatgtctgtgtctgatgagtgtagaatctctggatgtgcactgtcagtcatgtgtccaccaggcctcgaatatcatatgggaaatgtcatagttaaaaacgtacagccaggcccgtgtgctgttaatagtgtgaaattgtcatgttaaaaaaaaaaacaggaaccaaatgtgaccttgtgcatatattggtagctgaaaatcttcaaggctactgatgggtggccccttaatcttgtctttgattgctgtgtgcagggaaaggtgtccccgtttgttcatgctgttttggggggtgggggggtatttgcaagaatactcattttgacataataggtcctcttgtcagagatcctctaccacagacattaatagctgagcaggagccacatggattgattgtatccactcaccattgacgatggcattgagcgtagctagcttatttccatcactacgtgtttttgagcttgctcttacgttttaagaggtgccaggggtacatttttgcactgaaatctaaagatgttttaaaaaacacttttcacaaaaatagtcctttgtcattacattatttactcatgtgtttgtacatttttgtatgttaatttatgaatgattttttcagtaaaaaatacatattcaagaaccaaa

SEQ ID NO: 438 - DNA, 918 bp, Homo sapiens
ggtggccttgagaagctgagcggagaccggctagactttactcaaagaaaccaagagactgttaccatggcagggaagcccaagcttcactacttcaatggacggggcagaatggagcccatccggtggctcttggctgcagctggagtggagtttgaagagaaatttataggatctgcagaagatttgggaaagttaagaaatgatgggagtttgatgttccagcaagtaccaatggttgagattgatgggattaagttggtacagaccagagccattctcaactacattgccagcaaatacaacctctacgggaaagacataaaggagagagccctaattgatatgtatacagaaggtatggcagatttgaatgaaatgatccttcttctgcccttatgtcgacctgaggaaaaagatgccaagattgccttgatcaaagagaaaacaaaaagtcgctatttccctgccttcgaaaaagtgttacagagccatggacaagactaccttgttggcaacaagctgagccgggctgacattagcctggtggaacttctctactatgtggaagagcttgactccagccttatctccaacttccctctgctgaaggccctgaaaaccagaatcagcaacctgcccacggtgaagaagtttctacagcctggcagcccaaggaagcctcccgcagatgcaaaagctttagaagaagccagaaagattttcaggttttaataaagcagccatggaggctaagaacatgcaagaccaatattctaaagttttgcaacaatgaagtgctttacttaagtgttgattgtgcctgttgtaaagctaatgaaccctttccaattatatgctaattaaataataaaaactcctatttgcaaaaaaaaaaaaaaaaaaaaaaaaaaaaaa

SEQ ID NO: 439 - DNA, 2820 bp, Homo sapiens
ccagaaaggggcaggctgaggctgggggaggggctcaagggagcccagctgggagggcccaggcaggcagtgcggagctggccgtgggctgcctaccctttcatctctgcaactccttcctccctgggcctcccttctggagaagggccagagaatgtcgtcccagccagcagggaaccagacctcccccggggccacagaggactactcctatggcagctggtacatcgatgagccccaggggggcgaggagctccagccagagggggaagtgccctcctgccacaccagcataccacccggcctgtaccacgcctgcctggcctcgctgtcaatccttgtgctgctgctcctggccatgctggtgaggcgccgccagctctggcctgactgtgtgcgtggcaggcccggcctgcccagccctgtggatttcttggctggggacaggccccgggcagtgcctgctgctgttttcatggtcctcctgagctccctgtgtttgctgctccccgacgaggacgcattgcccttcctgactctcgcctcagcacccagccaagatgggaaaactgaggctccaagaggggcctggaagatactgggactgttctattatgctgccctctactaccctctggctgcctgtgccacggctggccacacagctgcacacctgctcggcagcacgctgtcctgggcccaccttggggtccaggtctggcagagggcagagtgtccccaggtgcccaagatctacaagtactactccctgctggcctccctgcctctcctgctgggcctcggattcctgagcctttggtaccctgtgcagctggtgagaagcttcagccgtaggacaggagcaggctccaaggggctgcagagcagctactctgaggaatatctgaggaacctcctttgcaggaagaagctgggaagcagctaccacacctccaagcatggcttcctgtcctgggcccgcgtctgcttgagacactgcatctacactccacagccaggattccatctcccgctgaagctggtgctttcagctacactgacagggacggccatttaccaggtggccctgctgctgctggtgggcgtggtacccactatccagaaggtgagggcaggggtcaccacggatgtctcctacctgctggccagctttggaatcgtgctctccgaggacaagcaggaggtggtggagctggtgaagcaccatctgtgggctctggaagtgtgctacatctcagccttggtcttgtcctgcttactcaccttcctggtcctgatgcgctcactggtgacacacaggaccaaccttcgagctctgcaccgaggagctgccctggacttgagtcccttgcatcggagtccccatccctcccgccaagccatattctgttggatgagcttcagtgcctaccagacagcctttatctgccttgggctcctggtgcagcagatcatcttcttcctgggaaccacggccctggccttcctggtgctcatgcctgtgctccatggcaggaacctcctgctcttccgttccctggagtcctcgtggcccttctggctgactttggccctggctgtgatcctgcagaacatggcagcccattgggtcttcctggagactcatgatggacacccacagctgaccaaccggcgagtgctctatgcagccacctttcttctcttccccctcaatgtgctggtgggtgccatggtggccacctggcgagtgctcctctctgccctctacaacgccatccaccttggccagatggacctcagcctgctgccaccgagagccgccactctcgaccccggctactacacgtaccgaaacttcttgaagattgaagtcagccagtcgcatccagccatgacagccttctgctccctgctcctgcaagcgcagagcctcctacccaggaccatggcagccccccaggacagcctcagaccaggggaggaagacgaagggatgcagctgctacagacaaaggactccatggccaagggagctaggcccggggccagccgcggcagggctcgctggggtctggcctacacgctgctgcacaacccaaccctgcaggtcttccgcaagacggccctgttgggtgccaatggtgcccagccctgagggcagggaaggtcaacccacctgcccatctgtgctgaggcatgttcctgcctaccatcctcctccctccccggctctcctcccagcatcacaccagccatgcagccagcaggtcctccggatcactgtggttgggtggaggtctgtctgcactgggagcctcaggagggctctgctccacccacttggctatgggagagccagcaggggttctggagaaaaaaactggtgggttagggccttggtccaggagccagttgagccagggcagccacatccaggcgtctccctaccctggctctgccatcagccttgaagggcctcgatgaagccttctctggaaccactccagcccagctccacctcagccttggccttcacgctgtggaagcagccaaggcacttcctcaccccctcagcgccacggacctctctggggagtggccggaaagctcccgggcctctggcctgcagggcagcccaagtcatgactcagaccaggtcccacactgagctgcccacactcgagagccagatatttttgtagtttttatgcctttggctattatgaaagaggttagtgtgttccctgcaataaacttgttcctgagaaaaaaaaaaaaaaaaaaaaaaaaaaaaaaaaaaaaaaaaaaaaaaaaaaa

SEQ ID NO: 440 - DNA, 1760 bp, Homo sapiens; identical to SEQ ID NO: 386

SEQ ID NO: 441 - DNA, 2133 bp, Homo sapiens
agggatttccccatttctgtttgctgcctgaaagcaggatgaggaaggccaaggagagtccttgcacccgtgagcgtcaggatgaggaaatgacaggaggaagacgtgggtttgggttagtggctgctggcgttttggcccttggtgtttctggagcctccagggatctaggggagcctgggctgcgtgcatgtcgataagcagagctgttcttggggagaaggagggaggtctcgggagtgtagcaccatgccaaccagccctgcgcgaagacagagtgagccacgcccggatggcagggcatgtttctgttttggtgtctcactttcctcccagcgtgacttatttggggattcctcagggcctactggaatgtgactgcccactgcccagctgcctcgggtacaagtcctggccctatgtcccagctgtcaggggctcagggaatcctacccagccacctgtcctgggatggagtgtcagcatccaccccttggttgtcatcgaggccgccctcccagtcctgggtgaagatatttgggccaccagggctcccttggccccttcacgtaggaaatagacacgtgctttttaatgcaggacactttgagtgttacaaaatctgtagacctggcagtagggtcatgatgttgggaagggtgtagtgccctaggttggtgacagaagggacagacacttgtgcacaggtgtctttggtgatggggtttttttttttataacttagtaaaaaaaaaaaaaaatgtatgtggaattctgtctcttggtaaagctcaaagccaggctagcctgaggtggcgcagggctctccttcctgtcccttcgatctccttgagaattaagagctggcagctgctgatggtgtttcccaacccccctcacttcccaagacaacccccagcttcaggtcctcatggggaggggagggcacgttcttgacacatgggaacttcgctcaggagggcctccccttcccctctccctcagagttttcactgccgtctcgtctttagaaagctgtttgaattccccccgcccccagtttggaccgtgtagatataactggatatacggatttttctctttgtgcaggcttcttatgccgttggtatacagggcaggaaagagaggaataaagggagagagcagtgtggaaaccacggtggttttgctttgttcttactaggttttggtgccaccttccctgcctgcgcttgtgccccctctcctccttggcactggcggcctccttgcctcccttccacccgtgctgccatcccgtgcctgtcgtgttggttcttcacacgtgctctgttctcggggttgttccattcatgccttcttggagggtgagggtggcttgggaaccgacccagtgatcatgcctactttcttctttgtatctccctccttcccagcccacccgggcagcagactctgatggaaggaaggtgccgtaggtgggcttttagaaactaacgggactggttttcaaagcagttatcttgggaaactgtttattccagcgatgtgacttttttcagaatatttcttggaatcatattcagagtctggggctgtgtgttgagcagccttaaggatgctagacactcatttagtgcccagggagtccagcgaatgacgtctgtggccaagcgaggtctcaggtgcaaagcaaaaggaccatttaaagtaaaatagcttggattcaatcatgtgacttttaaattggctcagaaagcaattttgtaatttcagagagtgttttgagccatggccacgttgtcattgtgagtctatagcttgactccttggagaacaatattcatttggttgtggagactgatttgctgggagaaatctgtcctgttactttctggtcatcccaggttctgacttttaccaggggcaaaaaaaaaaaaaaaaagcaagagggagataaatcccatctgtgagtttgtcttattggcgcctttttcctcagctgtcttccaagtattatttttactgttaaaaaattttttaaaaatgtgaaatgtaatgtttttacagcaacaatatgaaatatattttataaggaataaaatggtaccttgtctgaaaaaaaaaaaaaaa

SEQ ID NO: 442 - DNA, 1108 bp, Homo sapiens
agcagtggcccaaagaggagcagcagacaagagtgcagtggtggctgccgccgcaccagcctcagtggcagatgacacaccaccccccgagcgtcggaacaagagcggtatcatcagtgagcccctcaacaagagcctgcgccgctcccgcccgctctcccactactcttcttttggcagcagtggtggtagtggcggtggcagcatgatgggcggagagtctgcttgacaaggccactgcggctgcagcctggccttccctgttggccaatgggatgacctggcggcggccatggcggtggacaaaagcaaccctacctcaaagcacaaaagtggtgctgtggccagcctgctgagcaaggcagagcgggccacggagctggcagccgagggacagctgacgctgcagcagtttgcgcagtccacagagatgctgaagcgcgtggtgcaggagcatctcccgctgatgagcgaggcgggtgctggcctgcctgacatggaggctgtggcaggtgccgaagccctcaatggccagtccgacttcccctacctgggcgctttccccatcaacccaggcctcttcattatgaccccggcaggtgtgttcctggccgagagcgcgctgcacatggcgggcctggctgagtaccccatgcagggagagctgcctctgccatcagctccggcaagaagaagcggaaacgctgcggcattgtgcgcgccctgccggcggcgcatcaactgcgagcagtgcagcagttgtaggaatcgaaagactggccatcagatttgcaaattcagaaaatgtgaggaactcaaaaagaagccttccgctgctctggagaaggtgatgcttccgacgggagccgccttccggtggtttcagtgacggcggcggaacccaaagctgccctctccgtgcaatgtcactgctcgtgtggtctccagcaagggattcgggcgaagacaaacggatgcacccgtctttagaaccaaaaatattctctcacagatttcattcctgtttttatatatatattttttgttgtcgttttaacatctccacgtccctagcataaaaaaaaaaaaaaaaaaaaaaaaaaaaaaa

SEQ ID NO: 443 - DNA, 3049 bp, Homo sapiens
ttgctcggcgtttattagtgctgtctgggtagcattcccattgctcacaaagctctgtgtgcataaggacttcaagcagcatggtgcccaaggaaaatttattgctttttaccttttggggatgtttattccttatctttatgcattgtacctcatctgggcagtatttgagatgtttacccctatcctcgggagaagtggttctgaaatcccacctgatgttgtgctggcatccattttggctggctgtacaatgattctctcgtcctattttattaacttcatctaccttgccaagagcacaaaaaaaaccatgctaactttaactttggtatgtgcaattacattcctccttgtttgcagtggaacattttttccatatagctccaatcctgctaatccgaagccaaagagagtgtttcttcagcatatgactagaacattccatgacttggaaggaaatgcagttaaacgggactctggaatatggatcaatgggtttgattatactggaatttctcacataacccctcacattcctgcgatcaatgatagtatccgagctcactgtgaggagaatgcacctctttgtggttttccttggtatcttccagtgcactttctgatcaggaaaaactggtatcttcctgccccagaagtttctccaagaaatcctcctcatttccgactcatatccaaagaacagacaccttgggattctataaaattgacttttgaagcaacaggaccaagccatatgtccttctatgttcgagcccacaaagggtcaacactttctcagtggtctcttggcaatggcaccccagtcacaagtaaaggaggagactactttgtcttttactcccatggactccaggcctctgcatggcagttctggatagaagtgcaggtttcagaagaacatcctgaaggaatggtcaccgtggccattgctgcccactatctgtctggggaagacaagagatcccctcaactggatgctctgaaggaaaagttcccagattggacatttccctctgcctgggtgtgcacctacgatctctttgtattttaatcttgtggatgagctctaagtacatgcccagtggatactccatgtgacatggtttctccctatgttacgtggatgtttgtaacgtaagtcaatgaattttaatgatcatatgttcaaagagctttctgggttaacgcttttcagggccaagcactataagggtttagctgtggcgcagtgatgcatggcctgttgacacttgaaaatgccagtcttttggcacttcagcacatgtgggtactgccactacacacacgtcattttatatgaccttaaggacaaagccaacaatccacttcaatagctgcccctttaggatcaagaaagatgtacactgtcagagcattgttaatgagacaaaagttgtttccaatttaagccccaaaaccatttgttgtattagtggatggtgggtaaaatatcattcactgaggtaatgattccccttgagaatataactctgtgtaggtcactggaaagtgattgccatagggctgggagagaagcattgcactcttgaggctgtagcctgtgtcaagctgtttcttcaggcagcctctcaaatgtgctttgtctctctgtgctgaggcctggaccctgtgctgagctggtgactcactgtcctgacaagtggacacacagatgcactgctgtgctgctttcctgaggtggttttctatgcctgttttcctctgaaacatgtctgttacccctctccatcttaccaagttgaaaaggggaatatttggccacatacccctctggttttcgtaggttcttttggttcagaatattgtttgtgccagtacatgaccttaacttccttcctcagagcactgagctgccatctgggctattccggggtagaaggaaggctgggagtggtgggaattttataaatatttattctcttttctttgtttcataggagtcttgtgttatacaaggttagtccttcatggtataatcttactgatgcactgggcctatctttttgttttccagccagttgaatagattagtttttctcagtaacttactatccagcagactggctttcctgagacttgaggttgtggcttgtactggaatgagaccactgtacgtgtaggtggttcagatcctgcgtaatggcagcatgaggacttaaaaggtggttttcattttgaagatggctatgtagcttgtaaggtgtatcacagcagtacctctcatggctttttggttccagcagtgagggcattggtgagatcaatggtaaactgtgcaagctttctttttatcattaggaaatgtgaaacgttggacaaattttgagttttaacaaggacaaaaagttgaaagaaaaggcacagttaacaaaaaagggtggctagatttatcttgggtgatggaggaaatgagagaggaatgctcttgaaaggtggtctgtggatctgtctgaatagaaagagcacagtaagtatgcattgccggagaaaacgtccttgaagctgcttgtctcatgtgtatgatgtgctttttaaatcatgcccctcgttgcctgcctaatctgtgactccctaaaaactaactgggcccatgtagatggggctgcaaccagagctgaataacatgttaggctcacacatgcatcagcactgcacactgaaatcattgctcttcctggactttgtagaaatcagtctcaagtgcttcaagagtctggctcctgctacttttatctgtcaggtagcacataaggtttgcagggtttatattttgtatagaatcacagttgtggagaaaaagtaataatttctcaatgaattttaaaaatgggcctattttctatccccgtggttcatctgatataattagtgttccctgtgaattccccccctctatgggaaggatgcctttactctttatcagtaataaattatgactgttttcatattgccttagggttaaaaaaaaaaaaaaaaaaaaaaa

SEQ ID NO: 444 - DNA, 3045 bp, Homo sapiens; identical to SEQ ID NO: 345

SEQ ID NO: 445 - DNA, 1040 bp, Homo sapiens
cacatgtaaactacttgaactccatttcatcttttttcataccatctctaagattgctgccgcatttgcttgttaaactgaaagcatgtttcttgcaaaggctctattggaaggagcagatcgaggtcttggagaagctcttggaggcctctttggaggaggtggtcagagaagagaaggaggaggaagaaatattggagggatagttggaggaattgtgaattttatcagtgaggctgcagcagctcagtatactccagaaccgcctcccactcagcagcatttcaccagtgtggaggcctcagaaagtgaggaagttaggcgatttcggcaacaatttacacagctggctggaccagacatggaggtgggtgccactgatctgatgaatattctcaacaaagtcctttctaagcacaaagatcttaagactgacggttttagtcttgacacctgccggagcattgtgtctgtcatggacagtgacacgactggtaagctgggctttgaagaatttaagtatctgtggaacaacatcaagaaatggcagtgtgtttataagcagtatgacagggaccattctgggtctctgggaagttctcagctgcggggagctctgcaggccgcaggcttccagctaaatgaacaactttaccaaatgattgtccgccggtatgctaatgaagatggagatatggattttaacaatttcatcagctgcttggtccgcctggatgccatgtttcgtgccttcaagtctctggatagagatagagatggcctgattcaagtgtctatcaaagaatggctgcagttgaccatgtattcctgaagtgggaactgagaagtcaagatcctccctggaggacaggactgaaaaccttgccaagctgtacacagttgctgataccctgtgcaacagctctcatttcctggcaagctctttcacaaccctacatatttctgatcatgtgctgccttttactgctgaattaaaacagatatttcataaaaaaaaaaaaaaaaaaaaaaaaaaaaaa

SEQ ID NO: 446 - DNA, 2830 bp, Homo sapiens
gcttcacgctaaagccccagagcccgacgcggcagccgcggtagcggagaagactggagctccgaggagctgcatctgcggcaacctgtgcgctgacgctacgtgcctcctggctccgacgtagctcgcagctccccagtctcactccattccttccccacctggcgcgcacctgctcaagaccagggtcctgccaagcgctaggagggcgcgtgccaggggcgctagggaactgcggagcgcgcgcgccatggggccgccgcctggggccggggtctcctgccgcggtggctgcggcttttccagattgctggcatggtgcttcctgctggccctgagtccgcaggcacccggttcccggggggctgaagcagtgtggaccgcgtacctcaacgtgtcctggcgggttccgcacacgggagtgaaccgtacggtgtgggagctgagcgaggagggcgtgtacggccaggactcgccgctggagcctgtggctggggtcctggtaccgcccgacgggcccggggcgcttaacgcctgtaacccgcacacgaatttcacggtgcccacggtttggggaagcaccgtgcaagtctcttggttggccctcatccaacgcggcgggggctgcaccttcgcagacaagatccatctggcttatgagagaggggcgtctggagccgtcatctttaacttccccgggacccgcaatgaggtcatccccatgtctcacccgggtgcagtagacattgttgcaatcatgatcggcaatctgaaaggcacaaaaattctgcaatctattcaaagaggcatacaagtgacaatggtcatagaagtagggaaaaaacatggcccttgggtgaatcactattcaatttttttcgtttctgtgtccttttttattattacggcggcaactgtgggctattttatcttttattctgctcgaaggctacggaatgcaagagctcaaagcaggaagcagaggcaattaaaggcagatgctaaaaaagctattggaaggcttcaactacgcacactgaaacaaggagacaaggaaattggccctgatggagatagttgtgctgtgtgcattgaattgtataaaccaaatgatttggtacgcatcttaacgtgcaaccatattttccataagacatgtgttgacccatggctgttagaacacaggacttgccccatgtgcaaatgtgacatactcaaagctttgggaattgaggtggatgttgaagatggatcagtgtctttacaagtccctgtatccaatgaaatatctaatagtgcctcctcccatgaagaggataatcgcagcgagaccgcatcatctggatatgcttcagtacagggaacggatgaaccgcctctggaggaacacgtgcagtcaacaaatgaaagtctacagctggtaaaccatgaagcaaattctgtggcagtggatgttattcctcatgttgacaacccaacctttgaagaagacgaaactcctaatcaagagactgctgttcgagaaattaaatcttaaaatctgtgtaaatagaaaacttgaaccattagtaataacagaactgccaatcagggcctagtttctattaataaattggataaatttaataaaataagagtgatactgaaagtgctcagatgactaatattatgctatagttaaatggcttaaaatatttaacctgttaacttttttccacaaactcattataatatttttcataggcaagtttcctctcagtagtgataacaacatttttagacattcaaaactgtcttcaagaagtcacgtttttcatttataacaattttcttataaaaacatgttgcttttaaaatgtggagtagctgtaatcactttattttatgatagtatcttaatgaaaaatactacttctttagcttgggctacatgtgtcagggtttttctccaggtgcttatattgatctggaattgtaatgtaaaaagcaatgcaaacttaggcgagtacttcttgaaatgtctatttaagctgctttaagttaatagaaaagattaaagcaaaatattcatttttactttttcttatttttaaaattaggctgaatgtacttcatgtgatttgtcaaccatagtttatcagagattatggacttaattgattggtatattagtgacatcaacttgacacaagattagacaaaaaattccttacaaaaatactgtgtaactatttctcaaacttgtgggatttttcaaaagctcagtatatgaatcatcatactgtttgaaattgctaatgacagagtaagtaacactaatattggtcattgatcttcgttcatgaattagtctacagaaaaaaaatgttctgtaaaattagtctgttgaaaatgttttccaaacaatgttactttgaaaattgagtttatgtttgacctaaatgggctaaaattacattagataaactaaaattctgtccgtgtaactataaattttgtgaatgcattttcctggtgtttgaaaaagaagggggggagaattccaggtgccttaatataaagtttgaagcttcatccaccaaagttaaatagagctatttaaaaatgcactttatttgtactctgtgtggcttttgttttagaattttgttcaaattatagcagaatttaggcaaaaataaaacagacatgtatttttgtttgctgaatggatgaaaccattgcattcttgtacactgatttgaaatgctgtaaatatgtcccaatttgtattgattctctttaaatataaaatgtaaataaaatattccaataaaaaaaaaaaaaaaaa

SEQ ID NO: 447 - DNA, 2789 bp, Homo sapiens
agcgaggatgtgcgcagcgacttccagcgcagagtgccctacaactacctgcagcgggcctacatcaagcttaaccagctcgaaaaagcagtggaagcagctcacacatttttcgtggctaaccctgagcacatggaaatgcagcagaacattgagaattacagggcgacagctggtgttgaagcattgcagttggtagacagagaagccaagccacacatggagagttacaatgcaggagttaaacattatgaggctgatgactttgagatggctatcaggcatttcgaacaagccttaagagaatatttcgttgaagatacagaatgccggaccctatgtgaggggcctcagagatttgaagaatatgagtatttagggtataaggctggtctgtatgaagctattgcagatcactacatgcaggtgcttgtttgtcagcatgaatgtgtgagggaacttgccacccgccctggccgcctctctcccatcgagaattttcttcctctgcactatgattacctacagtttgcctactatcgagttggtgagtatgtgaaagccctggagtgtgccaaagcctatcttctatgccatccagatgatgaggatgtcctagacaatgtggattactatgagagtctgctggatgatagcattgacccggcatccattgaggccagagaggatttaacaatgttcgtgaaacgtcataagctggagtctgagctgataaaatcagctgcagaaggtctggggttttcatacactgaaccgaattattggatcagatatggaggacgacaggatgagaatcgggtcccttcaggagtgaacgtagagggagcagaagttcatggattctcaatgggaaaaaagctatcacccaagatagatcgagacctaagagaaggtggtcctctactctatgagaacatcacattcgtctacaactcggagcagctgaacgggactcagcgggttctcctggataacgtcctgtcggaagaacagtgccgggagctccacagcgtggccagtggaatcatgcttgttggtgatggatacagaggaaaaacttcaccccatacacccaatgaaaagtttgaaggtgcaactgtcctgaaagcactcaaatctggttatgaaggtcgagtcccactgaagagcgctcgtctgttttatgacatcagcgaaaaggctcgaaggattgtagaatcttattttatgctgaactcaactctgtatttttcctatacacacatggtctgccgaacagccctgtctggtcagcaggatagaagaaatgacctcagtcatcccatccatgctgacaactgtttgttggatccagaggccaacgaatgctggaaggagcctcctgcttacacatttcgagactatagtgctctcctatatatgaatgatgactttgaaggaggagaattcatattcacagagatggatgctaagactgtgactgcctctataaaaccaaaatgtgggcgcatgatcagcttctcatctggaggagagaaccctcatggggtgaaggcagtcaccaagggaaagaggtgtgctgtggctctgtggttcaccttggacccactttatagagaattggagcgaatacaggctgatgaagtgattgcaattctggatcaagaacagcaagggaagcatgaactgaatatcaaccctaaagatgagctataaaaatgagaaagaatgttctatcaaatatttatttaaattgttaatcttatgagaacctttttatttttgtacagagccatggtataaattaacaggttaatgtcagtcatcagatcttccttctcttcctaaggatgcttgtgttgcctcaatctatcaatctatctttcttgttttgggttgttttctctctctctctctctctctctcttcttagagacatggtctaaccatgttgtctaggatatagggcagtggctattcacagatgtgatgatagcacactggagcctcaaactcttaggctcaggcgatccttcaagcctcccggggagctgggaccacaggcacgtgccaccacacccagctctctttcttggtttttcatcatttcatgtatctatcaaagcccagttcacctcctcccccaaacacacacacacacacacacacacacacacacaattaagttgctgcaaattcaaaagcttagagagaataagcttcttggtggtgaaactacaactctcacgtgtgctccagttctaaaattaacctgtgcctggtctctgaagccctttcttgctctgtgcctttcagccacatccttaggtgctaacggccatgagctccgactctccaaagtgagctccactttgggtctgaggagcccctggcagagtccacgctgcctcaggtatcatgggcgtaatgatcacccaggctccgggagatctcatggatgattactgtatgagacagaggggacttcagtctttccagggccttggtggaatttttggctctggtgttttcgccagacaataaacttacactggaagctttgattcaccctccacagtactccagaaaggactgtcctataagttgtacactttaaaaggtcatgtagaggttgtagtagaatggcttttcaccctggtgactttggaagaaactcttgaatactgcctgcatccgggcaccatggccaggttgcctaggagtggggtccactgatgaaaagaggtgttttgtacttacataagaaaaataaatttctgattgatttt

SEQ ID NO: 448 - DNA, 2227 bp, Homo sapiens
ctcgatgtagaggggttggtagcagacaggtggttacattagaatagtcacacaaactgttcagtgttgcaggaaccttttcttgggggtgggggagtttcccttttctaaaaatgcaatgcactaaaactattttaagaatgtagttaattctgcttattcataaagtgggcatcttctgtgttttaggtgtaatatcgaagtcctggcttttctcgttttctcacttgctctcttgttctctgtttttttaaaccaattttactttatgaatatattcatgacatttgtaataaatgtcttgagaaagaatttgtttcatggcttcatggtcatcactcaagctcccgtaaggatattaccgtctcaggaaaggatcaggactccatgtcacagtcctgccatcttactttcctcttgtcgagttctgagtggaaataactgcattatggctgctttaacctcagtcatcaaaagaaacttgctgttttttaggcttgatctttttcctttgtggttaattttcctgtatattgtgaaaatgggggattttccctctgctcccacccacctaaacacagcagccatttgtacctgtttgcttcccatcccacttggcacccactctgacctcttgtcagtttcctgttcctggttccatctttttgaaaaaggccctcctttgagctacaaacatctggtaagacaagtacatccactcatgaatgcagacacagcagctggtggttttgtgtatacctgtaaagacaagctgagaggcttactttttggggaagtaaaagaagatggaaatggatgtttcatttgtatgagtttggagcagtgctgaaggccaaagccgcctactggtttgtagttaacctagagaaggttgaaaaattaatcctacctttaaagggatttgaggtaggctggattccatcgccacaggactttagttagaattaaattcctgcttgtaatttatatccatgtttaggcttttcataagatgaaacatgccacagtgaacacactcgtgtacatatcaagagaagaaggaaaggcacaggtggagaacagtaaaaggtgggcagatgtctttgaagaaatgctcaatgtctgatgctaagtgggagaaggcagagaacaaaggatgtggcataatggtcttaacattatccaaagacttgaagctccatgtctgtaagtcaaatgttacacaaaaaaaaatgcaaatggtgtttcattggaattaccaagtgcttagaacttgctggctttcccataggtggtaaaggggtctgagctcacaccgagttgtgcttggcttgcttgtgcagctccaggcacccggtgggcactctggtggtgtttgtggtgaactgaattgaatccattgttgggcttaagttactgaaattggaacaccctttgtccttctcggcgggggcttcctggtctgtgctttacttggcttttttccttcccgtcttagcctcacccccttgtcaaccagattgagttgctatagcttgatgcagggacccagtgaagtttctccgttaaagattgggagtcgtcgaaatgtttagattcttttaggaaaggaattattttccccccttttacagggtagtaacttctccacagaagtgccaatatggcaaaattacacaagaaaacagtattgcaatgacaccattacataaggaacattgaactgttagaggagtgctcttccaaacaaaacaaaaatgtctctaggtttagtcagagctttcacaagtaataacctttctgtattaaaatcagagtaaccctttctgtattgagtgcagtgttttttactcttttctcatgcacatgttacgttggagaaaatgtttacaaaaatggttttgttacactaatgcgcaccacatatttatggtatattttaagtgactttttatgggttatttaggttttcgtcttagttgtagcacacttaccctaattttgccaattattaatttgctaaatagtaatacaaatgacaactgcattaaatttactaattataaaagctgcaagcagactggtggcaagtacacagcccttttttttgcagtgctaacttgtctactgtgtattatgaaaattactgttgtccccccacccttttttccttaaataaagtaaaaatgacaccctaaaaaaaaaaaaaaaaaaaaaaaaaaaaaaa

SEQ ID NO: 449 - DNA, 1628 bp, Homo sapiens
ggcacgaggattgctcaggacagcggtaaatcacttcttggaggtgccctgcacgccggtcctgggagcaggcggcctcccgggggtgcgggagccccactcctccgtggtgtgttccatttgcttcccacatctggaggagctgacgtgccagcctcccccagcaccacccagggacgggaggcatgagccggtcaaggcacctgggcaaaatccggaagcgtctggaagatgtcaagagccagtgggtccggccagccagggctgactttagtgacaacgagagtgcccggctggccacggacgccctcttggatgggggttctgaagcctactggcgggtgctcagccaggaaggcgaggtggacttcttgtcctcggtggaggcccagtacatccaggcccaggccagggagcccccgtgtcccccagacaccctgggaggggcggaagcaggccctaagggactggactccagctccctacagtccggcacctacttccctgtggcctcagagggcagcgagccggccctactgcacagctgggcctcagctgagaagccctacctgaaggaaaaatccagcgccactgtgtacttccagaccgtcaagcacaacaacatcagagacctcgtccgccgctgcatcacccggactagccagaacatttccatccggagtgtggaaggagagatatactgtgccaagtcaggcaggaaattcactggccaaatccgggagaagttcatcatctcggactggagatttgtcctgtctggatcttacagcttcacctggctctgcggacacgtgcaccggaacatcctctccaagttcacaggccaggcggtggagctgtttgacgaggagttccgccacctctacgcctcctccaagcctgtgatgggcctgaagtccccgcggctggtcgcccccgtcccgcccggagcagccccggccaatggccgccttagcagcagcagtggctccgccagtgaccgcacgtcctccaaccccttcagcggccgctcggcaggcagccaccccggtacccgaactgacggctgagatgaggttagaatgactgggcccggctgaacattccaaattggatttcaccatctgctgagaaagtttaaggaaggcaaagcttgccaggtcacagaagctcccaagcccagctttccaaaggcctcagcctgtgcctgtgtcgagctcagtcctgggagataggggagaacctgcaggcaggaacaagcccccctactcctgaccaccctccatcagcagtctcccctccgtggtcgtctttgttgacaaaggtgcagtttctcctctcctgggcacctgtaacatgtgatgcgctgcctgctgggaggttaggtcggggctgccccggcgagtggagcatgagcagaaccgccgagggtcacttctgggcagaagctttgagagcctgggtccaggttgccacatagaagcagctctccagttgaaaccctcctctgccagcctggggtcctaagcgatgagcagaatcccccactcccaccccaccaacccacaatggatatgtagtgagcaagaaataaacctttgttgtttaaaaaaaaaaaaaaaaaaaaa

SEQ ID NO: 450 - DNA, 1321 bp, Homo sapiens
gtgtgctggttcaaggtgcaacatacagaatattgaattaagaaaagagggaacggggaagggaagggaaacctcttgaggtccaaagttgcaaacaaaaaatggtaaaagatttcctcacgcaagaggcatttttgcaaataccatgcaaaacaggcagctggtgtgccttaagagaatccctataaataacagaaaagacactccaagcattcctgtacgtggactcagagcacagagaaaagaaactaaaatgccttttggcatttcaagatatttggcactcttgtgattacatttttttacagtccattaaagagaataaactgacataatattagagaaataaacaggctgctcacacaacagactgcaaggggaagttagaaaaagctcaagcatttttttctttgtttttcgtgtgtgtgtgtgtgtgtgtgtgtgtgtgtgtgtgtgtgtgtttttctgacataaaaaatgtgtccatttgcattaacttgggcagatagcttgcagcaacaaagaaacacacgctttacaactcattttaaaataaaatcttttctatgtatcattccttagaaaagttctcttcttgttttaaacacattcctgataacttctaaagatgaccaaaataaaacagaatatctacagagatcattttctgaattttttgtacatccaaggataacaacataaaaaaaataaaactggacagcatttcacatccaagtgcacagaaccatttttgcaagattaaataatgtaaacattgggaacagccaaatcagcgaagaatgccaacacctcaaaacacctggtgttgccgcttcattaagtggttcaaaatccagatctataattgcgcaatattcaccgtatataaaaagaaatggatattaattttgacaaatagctgcaactgagacttctttttatttctttatatgtgtatatagtgaatttttattatttttaaaattttatttatttttttatttttatttttgcagaggagcccagagccttctcctcctcctcctcctcctctcgcctcatctgtctcccggcctgataccagatacaggttgttgatttcatcgtgggtagcaagctagtaataaatttcaaagtgctttctcttttcatgctttttgccaataactgttaccgccgttcttattctctcccttaactcattgtctttgggggagttagacaccaggaggtgccttgtcggtcatatttttcagcacgtcatcaatcctatcatcttcaataacaacccgcttgctccggccgatctggcccagcttgg

SEQ ID NO: 451 - DNA, 234 bp, Homo sapiens
atttactgtaggactagtggcagtgagtctcatattgctgtcatataaaaggtaaaccttccagaagaactttgaaaatttcagtagcctaaagaccacgctttgagaaactcgtaaaggtttgtcatagaggttttaaaagtctgatcaaataattttaagctttagttgcctactaaaaagtaggatgcagtacaagtttgtcctttacttggtaaaaaaaaaaaaaaaaaa

SEQ ID NO: 452 - DNA, 414 bp, Homo sapiens
catttttaatcctcagtacattttcaacccatcatttttttttaatacaagtaaaagggggtgatgcaaacacccccaaggtcagaaccaggaggatctgctgggctgtccctggaccaaaggcggaaagggcgacaagacgccgaagcaaggtagcgcatcacgctgggaggggagggtggcagcagcagaggggcctgcctcctggcatccccggtactgggcagtgtgtgaagcctccctgtgggtgtggggacctggggcacacccacctgcccctcactaggagagggtttctgttggcagtcaggctttgggggtctctgtctggactcctgaggcctgggagcactacactcctcccagaagaggggacatccgtgtctgcttggctcagcagagctgcccacaccc

SEQ ID NO: 453 - DNA, 504 bp, Homo sapiens
ttttttttgcaaaacaaagaaaaatattttattgtaacttaaaattcatcccctagacaacagataacgcccacattggatgttatttagcagacatagtgaagatgcctttggacaattatcagcattgatgaatatgaagatgtcacatcaaagtcaaactttttcaggttattgggtttcctgaacataactggcaaaaaggaactttcaacacaacaagtagtttagttttttttttttttatgtcacttattttatttactaaccttgacagggactaaagaatgaggtacagaaaactttccagaagtctgagtgtggtgtagaagtccaagacaacttggagctccattattgcattattaagtagaatgaactgttatgaaattctccatattccaggtttactacatagaaaagtactatttacctacctcacagaggtattgtgaggatttgtgtttataaagtgcttcaggcgccttcgaagaaaggcaacat

SEQ ID NO: 454 - DNA, 651 bp, Homo sapiens
  misc_feature (408)..(408): "n" = a, t, g, or c.
  misc_feature (482)..(482): "n" = a, t, g, or c.
  misc_feature (633)..(633): "n" = a, t, g, or c.
  misc_feature (643)..(643): "n" = a, t, g, or c.
taaggtagaaccaagtttattaatgacagcctttattacaatcactctcaagtgtaaaaaataaagggtgattaattaatatttaaaactcactcggacttgctgtttggcctttcagtggatgtgccaaagggcagggatcttgcctgattctgaatcaattggccagatggagttcactggagaatgaggcaatcaacaaaaaagacaaatgatgccaactggagagagctcgtgtcttctccatgttggaaggacattacaaaatggcaactgtggtgggggcagagatgaagtaagacaaccttacagtcggagtaagatgtgaatacctctacctatacagagacaaaaacacacacatgcagagccatacacacacccaaacagtgaacacagttttgaaantaatttcctttttgtcctttctctgagcagactgacacattcatcggccaccaccatgcaccatggggctgganatggaaaacctcgcttaatttccacaagtattctagctgggctgcccgttatgtggctgggcaaatctgtccgcaccgaaaatgtgcctgtggttttcccagagttccacagactgatatctgctcccaggagggcaacatccggtggacnccagctgggnttaaatct

SEQ ID NO: 455 - DNA, 622 bp, Homo sapiens
  misc_feature (16)..(16): "n" = a, t, g, or c.
  misc_feature (515)..(515): "n" = a, t, g, or c.
  misc_feature (522)..(522): "n" = a, t, g, or c.
  misc_feature (582)..(582): "n" = a, t, g, or c.
gtatcctgcacgtggnaatattcagaattgtagatagcataactctccctgctcctattcttttgagcctaggtataattttttttttttttttttagaaaaagacatatttagctttaatttctatttatgctaaacatatttataagtagtctgtcaatataataccaactatttttatttttacataattcaattatttcatttgacatgtctggcagactcaagacattaagtaaaaaattggaactatgatttttctttgtcattttttaaaaaagaattattttattaacctgctggcatataatctggagttcttttcacaaccttactttttctgatttgctttattgaatgattgaatactcatttctttctaaaaatatgttgtaaattctcccttggcaagatttctccctatgaggggagttattatttgagtctgccaagtggttaccatgggggcaaggtgccatgatggtattcctggggtgcattgggtttttgcgcantggaaanttaagacacctatagtaagtggactcattcatagatgaggttcagaaccctttacggtcncgggagaaggcctctgtccggacaggcagaagagtggttt

SEQ ID NO: 456 - DNA, 464 bp, Homo sapiens
  misc_feature (415)..(415): "n" = a, t, g, or c.
  misc_feature (420)..(420): "n" = a, t, g, or c.
  misc_feature (447)..(447): "n" = a, t, g, or c.
tgcataggattaagactgagtatcttttctacattcttttaactttctaaggggcacttctcaaaacacagaccaggtagcaaatctccactgctctaaggttctcaccaccactttctcacacctagcaatagtagaattcagtcctacttctgaggccagaagaatggttcagaaaaataatgattataaaaaataacaattaagaaaaataatcacatagaggtaaaataaagcaactaaacatcatagttttgcatttttagaaaagcatttaaacatttagaattatagtaaatatattacatttattctaaaacttcaaaattattctgtttttgtagtactgaaaagaagatagtgccatttggaaacaacagatggcatccttttatacattttcacaagtttgggntttcntattttttaaaggggccccatttatcnggtaacagtggggaatt

SEQ ID NO: 457 - DNA, 693 bp, Homo sapiens
  misc_feature (529)..(529): "n" = a, t, g, or c.
  misc_feature (569)..(569): "n" = a, t, g, or c.
  misc_feature (660)..(660): "n" = a, t, g, or c.
ttttttttttttttggccattggagatgtttattacactgcttcggctggacacgcaaccatgtgacactaatgtgtcatagaaggtctctgagcactttggctcattttgaatataatttttaaaaatatacacaaggctggctttccaatgtttaaaatcattgtagaaaccaacaggttgaacagaaatataaaagtacagaaaatggttttcctgctttggtgttggttgtggcggccgaagaacgtgactgctgctgtttacacaagtccagacgctgccagggcctgttgggatcagctcagtctgcgactaaaacagctggatcatcgactctcttgacttgccaacaccaacccatttgactgcgactcccacgtgattctccacaaagcggatgtagttctgggcctgtgggggcaggtcctcccacctcctggcgcctgtggtgtctgctttccacccaggcagcgtttcatactcaacttcgaccttctgaagcatctcctggttagctgggaaatanggaatccttttcccgttcagcttgtatgagacaccgactntaacctcacccagtacgttccagatgtccagcttcgtcagggccagcgcagtgaatccgttgaccatgtgagcatatcttagaatcatcangtcgagccagccgcagcgcctcttcctgcctgt

SEQ ID NO: 458 - DNA, 558 bp, Homo sapiens
tttttttttttttgattttaaattaaaagttatgattttatttttaattttaatacaccaggaaaaaatattttttttaatgtcgtgaaataagcacttgaaaataacaacttcaacattgctgtgatttgctctgtgaggcttatatgggtgggcttccatatgaatatgggctctgaggtccccaagaagctgaatcttccagtggttttcaagatagcagcaagcaacctcctgcctgaatatgtctagacaggcagacctgtttgaaacgagtatgaccagggaggactgttaggctacttctgtggccttcttagtttttgtcgatggaaataaagtctcaagtgctactaagcattgggaaagtaacagcatttaaataccaatgtcgagtcagaacccttcatggccggcccgaatgggttataaatgtggcttgaccctgacttatgggaccagttattaatttaaccagttacttcagaagaggttactacaatgcagtgttggtttggacgtctagtgaaatatattttactgtgagacttctgcctg

SEQ ID NO: 459 - DNA, 533 bp, Homo sapiens
  misc_feature (458)..(458): "n" = a, t, g, or c.
  misc_feature (470)..(470): "n" = a, t, g, or c.
  misc_feature (476)..(476): "n" = a, t, g, or c.
  misc_feature (481)..(481): "n" = a, t, g, or c.
  misc_feature (511)..(511): "n" = a, t, g, or c.
ttttaatataaaaagatcaatgaaaaatttatttataaatttttcacgctgggctacaggtcaatatcgtacactcaggaatgtgctgcacaaactttatccagttagcagtgatcaccccgtgacccacacacagcttcgatataagcctagaaagtcttaacattaattaacataattaaaaaggtatttgcatctagaaaaaatatacagaagaactccttgtggagtaatctgtgcctccatttcaatgtctgcttgtttcactgacattatcaatatattcttctcacacaaagttttataaaaagcgacggagggcttgcccgaatacgaccagccacgcacaaagggcctccacccacctgtgtcctcaagtgctccccatttctgcacgaagggtcagcagcacttccatgaagggggaaacctcatttaaatttgaataattcagcctnccttttatttcncagggntcaanaaaaacaagggggtgtggggctgcataganattggagccacaggaaccagga

SEQ ID NO: 460 - DNA, 488 bp, Homo sapiens
atgtcacttattttatttactaaccttgacagggactaaagaatgaggtacagaaaactttccagaagtctgagtgtggtgtagaagtccaagacaacttggagctccattattgcattattaagtagaatgaactgttatgaaattctccatattccaggtttactacatagaaaagtactatttacctacctcacagaggtattgtgaggatttgtgtttataaagtgcttcaggcgccttcgaagaaaggcaacatacaagtataaaataatcatacaaatttcaaaataaatgaaaagatgattttggcacaatgggaagggtgcctcctatttaaagaacacttggctattggtttataaaatcccctgacctcttgggttttaaaaaaattattatttaaaagaataaatgtttttccattgccaatcttataaaaattctcaatccaggctgtgttatcagaatcacttgaagagctcagt

SEQ ID NO: 461 - DNA, 596 bp, Homo sapiens
tgatgtaacatttgttatttattggaaaaagctggtattaacatatttatagttttattcaacaattgggtaatttgtgagacaccaaagaaaaaaagaatgcacctatgagttacagagtccaaactgatcagggctgacaacttgaccaccatgtatcccacaccaccacccccaccaccaccaccaccaacagcttcgtcctcagagaagagctaaattaaaaacaaaaccaaaaaaaccccaacaacttcacaatgactatgtgaacgcccgtacattcgagagtaccaggaaatgtaagcagagccaggatgcaagtctgtgactattacactggtccttccaccgtttctggttttgtccctcccctcgacaccttttcttaacacacatttgatcttcacaatttgctttggacatcattattttccagggatccagagacatacttttcttcaaagaagatcttttcctttcttttttcttctttttggtttggtacccaaagtttaaaacagaagtaaggaactaggaactgtattaagacctccttttgaaggacatgtaagatttgtactttgaagatggtaaat

SEQ ID NO: 462 - DNA, 582 bp, Homo sapiens
gggggggcgtccagagtctctctgggtctcagatgtccatctgccacctcttgttaaggctctagccagaagggagggtgagggtagaagaaagttattcccgaagaaaaaaagaatgaaaagtcattgtactgaactgtttttatatttttaaaagttactatttaaaggttggtttgattgttgcgtcttaattgcctctcctcccagtttgccagtcccgccccccgccccccgggaaaacagccaggccactgttgctgtcacattctggagcctgggccagggccatttcccatcgatgtgagctcttctcatctcacagcattccctgcgctgcttccacccccttctccccttccagatacccagcatcgcagcagggatttcacaatcccatactgtgtcgcctcccatccaagcgccagggagggtggggggtaggagctaagacttcctctggacagatgggcagggcagagttcactgaggtgaaggaagaccacaggttaacaccaaagtattgtacagctgtcaatgcaaaacttttttggaaaaaaattaaacgtaaatggaacttaa

SEQ ID NO: 463 - DNA, 489 bp, Homo sapiens
ttttttttttttaaagtctaacaactttgtgtttatttttgctttaatcttgtcatgggtaaatttttagctgttcatttttatacaacaccacaggatcagagatagcatgaacacattagtctctacaaggctaattctacccgagcacccatcaaagcgacccaaatgacacgccatgcatcttgagtgaccgtgcactgccatatactctgagctctactacaggtaatgttacaccaaattgacattgtaactgtgtttcaaatgtctcttagagacaaatacagatcagtaggtataataacctctgaagacttccaagagtaatgaggtttcgccaagccttgttgtatttatcatggatggttttcaggaaataacttacgagaaagcctgattgattttacagtcattttgacctgtgatttatttattaagtacaatttgaagattcctaaaataaagtattgccaataaattatagat

SEQ ID NO: 464 - DNA, 2318 bp, Homo sapiens
gggggaagatggcggacgtgcttagcgtcctgcgacagtacaacatccagaagaaggagattgtggtgaagggagacgaagtgatcttcggggagttctcctggcccaagaatgtgaagaccaactatgttgtttgggggactggaaaggaaggccaacccagagagtactacacattggattccattttatttctacttaataacgtgcacctttctcatcctgtttatgtccgacgtgcagctactgaaaatattcctgtggttagaagacctgatcgaaaagatctacttggatatctcaatggtgaagcgtcaacatcggcaagtatagacagaagcgctcccttagaaataggtcttcagcgatctactcaagtcaaacgagctgcagatgaagttttagcagaagcaaagaaaccacgaattgaggatgaagagtgtgtgcgccttgataaagagagattggctgcccgtttggagggtcacaaagaagggattgtacagactgaacagattaggtctttgtctgaagctatgtcagtggaaaaaattgctgcaatcaaagccaaaattatggctaagaaaagatctactatcaagactgatctagatgatgacataactgcccttaaacagaggagttttgtggatgctgaggtagatgtgacccgagatattgtcagcagagagagagtatggaggacacgaacaactatcttacaaagcacaggaaagaatttttccaagaacatttttgcaattcttcaatctgtaaaagccagagaagaagggcgtgcacctgaacagcgacctgccccaaatgcagcacctgtggatcccactttgcgcaccaaacagcctatcccagctgcctataacagatacgatcaggaaagattcaaaggaaaagaagaaacggaaggcttcaaaattgacactatgggaacctaccatggtatgacactgaaatctgtaacggagggtrcatctgcccggaagactcagactcctgcagcccagccagtaccaagaccagtttctcaagcaagacctcccccaaatcagaagaaaggatctcgaacacccattatcataattcctgcagctaccacctctttaataaccatgcttaatgcaaaagaccttctacaggacctgaaatttgtcccatcagatgaaaagaagaaacaaggttgtcaacgagaaaatgaaactctaatacaaagaagaaaagaccagatgcaaccagggggcactgcaattagtgttacagtaccttatagagtagtagaccagccccttaaacttatgcctcaagactgggaccgcgttgtagccgtttttgtgcagggtcctgcatggcagttcaaaggttggccatggcttttgcctgatggatcaccagttgatatatttgctaaaattaaagccttccatctgaagtatgatgaagttcgtctggatccaaatgttcagaaatgggatgtaacagtattagaactcagctatcacaaacgtcatttggatagaccagtgttcttacggttttgggaaacattggacaggtacatggtaaagcataaatcgcacttgagattctgaattatttggctcctccatttctggaaattgagactcaagctttatgaatttatcaagaacttaaaaatgaagaaggtcacagattgatcttttataagaccttatttgatgctttgtgcttcaaggagatgatacctgtcatccatataagcaaactttttggcttacaactatttttttaatattagccttctagtctgtaatggaaattgtatattttgatagaagttttttctccattggttaaattagcattacttaaaatttgtttctttagaaaataaatgcaggttataaatgtgtgtatatttagagattataaggctctctgagccatcttctgatttttcattgctctataattctttttactgaaaatactatgttatgaatggtattaaattttagtctctggaacatccaaaaccaagcaaagggatgtgactattttgaatgaatcagaatgtcaacttgtatgtacactatatctacacttactcattatttaaaaagaataatgaaaaatctagatcaattcttcaatttgattgaactgttcagccttttcaagatttctttatttacaaatgattacatttaaatgaatgtacattcttctcactgactttggtgattttgaaacctagaatgatgtgtttctatctgtaatatctttccatttgaaaaaaatctcaaaacacagattaaaaccac

SEQ ID NO: 465 - DNA, 1807 bp, Homo sapiens
gcacgagggaagagggtgatccgacccggggaaggtcgctgggcagggcgagttgggaaagcggcagcccccgccgcccccgcagccccttctcctcctttctcccacgtcctatctgcctctcgctggaggccaggccgtgcagcatcgaagacaggaggaactggagcctcattggccggcccggggcgccggcctcgggcttaaataggagctccgggctctggctgggacccgaccgctgccggccgcgctcccgctgctcctgccgggtgatggaaaaccccagcccggccgccgccctgggcaaggccctctgcgctctcctcctggccactctcggcgccgccggccagcctcttgggggagagtccatctgttccgccagagccccggccaaatacagcatcaccttcacgggcaagtggagccagacggccttccccaagcagtaccccctgttccgcccccctgcgcagtggtcttcgctgctgggggccgcgcatagctccgactacagcatgtggaggaagaaccagtacgtcagtaacgggctgcgcgactttgcggagcgcggcgaggcctgggcgctgatgaaggagatcgaggcggcgggggaggcgctgcagagcgtgcacgcggtgttttcggcgcccgccgtccccagcggcaccgggcagacgtcggcggagctggaggtgcagcgcaggcactcgctggtctcgtttgtggtgcgcatcgtgcccagccccgactggttcgtgggcgtggacagcctggacctgtgcgacggggaccgttggcgggaacaggcggcgctggacctgtacccctacgacgccgggacggacagcggcttcaccttctcctcccccaacttcgccaccatcccgcaggacacggtgaccgagataacgtcctcctctcccagccacccggccaactccttctactacccgcggctgaaggccctgcctcccatcgccagggtgacactggtgcggctgcgacagagccccagggccttcatccctcccgccccagtcctgcccagcagggacaatgagattgtagacagcgcctcagttccagaaacgccgctggactgcgaggtctccctgtggtcgtcctggggactgtgcggaggccactgtgggaggctcgggaccaagagcaggactcgctacgtccgggtccagcccgccaacaacgggagcccctgccccgagctcgaagaagaggctgagtgcgtccctgataactgcgtctaagaccagagccccgcagcccctggggcccccggagccatggggtgtcgggggctcctgtgcaggctcatgctgcaggcggccgaggcacagggggtttcgcgctgctcctgaccgcggtgaggccgcgccgaccatctctgcactgaagggccctctggtggccggcacgggcattgggaaacagcctcctcctttcccaaccttgcttcttaggggcccccgtgtcccgtctgctctcagcctcctcctcctgcaggataaagtcatccccaaggctccagctactctaaattatggtctccttataagttattgctgctccaggagattgtccttcatcgtccaggggcctggctcccacgtggttgcagatacctcagacctggtgctctaggctgtgctgagcccactctcccgagggcgcatccaagcgggggccacttgagaagtgaataaatggggcggtttcggaagcgtcagtgtttccatgttatggatctctctgcgtttgaataaagactatctctgttgctcac

SEQ ID NO: 466 - DNA, 2223 bp, Homo sapiens
tcagtgtgtgcggaacgcaagcagccgagagcggagaggcgccgctgtagttaactcctccctgcccgccgcgccgaccctccccaggaacccccagggagccagcatgaagcgagctcaccccgagtacagctcctcggacagcgagctggacgagaccatcgaggtggagaaggagagtgcggacgagaatggaaacttgagttcggctctaggttccatgtccccaactacatcttcccagattttggccagaaaaagacggagaggaataattgagaagcgccgacgagaccggatcaataacagtttgtctgagctgagaaggctggtacccagtgcttttgagaagcagggatctgctaagctagaaaaagccgagatcctgcagatgaccgtggatcacctgaaaatgctgcatacggcaggagggaaaggttactttgacgcgcacgcccttgctatggactatcggagtttgggatttcgggaatgcctggcagaagttgcgcgttatctgagcatcattgaaggactagatgcctctgacccgcttcgagttcgactggtttcgcatctcaacaactacgcttcccagcgggaagccgcgagcggcgcccacgcgggcctcggacacattccctgggggaccgtcttcggacatcacccgcacatcgcgcacccgctgttgctgccccagaacggccacgggaacgcgggcaccacggcctcacccacggaaccgcaccaccagggcaggctgggctcggcacatccggaggcgcctgctttgcgagcgccccctagcggcagcttcggaccggtgctccctgtggtcacctccgcctccaaactgtcgctgcctctgctctcctcagtggcctccctgtcggccttccccttctctttcggctccttccacttactgtctcccaatgcactgagcccttcagcacccacgcaggctgcaaaccttggcaagccctatagaccttgggggacggagatcggagctttttaaagaactgatgtagaatgagggaggggaaagtttaaaatcccagctgggctggactgttgccaacatcaccttaaagtcgtcagtaaaagtaaaaaggaaaaaggtacactttcagataattttttttttaaagactaaaggtttgttggtttacttttatcttttttaatgtttttttcatcatgtcatgtattagcagtttttaaaaactagttgttaaattttgttcaagacattaaattgaaatagtgagtataagccaacactttgtgataggtttgtactgtgcctaatttactttgtaaaccagaatgattccgtttttgcctcaaaatttggggaatcttaacatttaggtatttttggtctgtttttctccttgtatagttatggtctgtttttagaattaattttccaaaccactatgcttaatgttaacatgattctgtttgttaatattttgacagattaaggtgttgtataaataatattcttttggggggaggggaactatattgaattttatatttctgagcaaagcgttgacaaatcagatgatcagctttatccaagaaagaagactagtaaattgtctgcctcctatagcagaaaggtgaatgtacaaactgttggtggcctgaatccatctgaccagctgctggtatctgccaggactggcagttctgatttagttaggaggaccgctgataggttaggtctcatttggagtgttggtggaaaggaaactgaaggtaattgaatagaatacgcctgcatttaccagccccagcaacacaaagaatttttaatcacacggatctcaaattcacaaatgttaacatggataagtgatcatggtgtgcgagtggtcaattgagtagtacagtggaaactgttaaatgcataacctaattttcctgggactgccatattttcttttaactggaaatttttatgtgagttttccttttggtgcatggaactgtggttgccaaggtatttaaaagggctttcctgcctccttctctttgatttatttaatttgatttgggctataaaatatcatttttcaggtttattcttttagcaggtgtagttaaacgacctccactgaactgggtttgacctctgttgtactgatgtgttgtgactaaataaaaaagaaagaacaaagtaaaaaaaaaaaaaaaaaaaaaaaaaaa

SEQ ID NO: 467 - DNA, 461 bp, Homo sapiens
cgcgccccgagcccccgcgccatgaagctcgccgccctcctggggctctgcgtggccctgtcctgcagctccgctcgtgctttcttagtgggctcggccaagcctgtggcccagcctgtcgctgcgctggagtcggcggcggaggccggggccgggaccctggccaaccccctcggcaccctcaacccgctgaagctcctgctgagcagcctgggcatccccgtgaaccacctcatagagggctcccagaagtgtgtggctgagctgggtccccaggccgtgggggccgtgaaggccctgaaggccctgctgggggccctgacagtgtttggctgagccgagactggagcatctacacctgaggacaagacgctgcccacccgcgagggctgaaaaccccgccgcggggaggaccgtccatccccttcccccggcccctctcaataaacgtggttaagagc

SEQ ID NO: 468 - DNA, 1967 bp, Homo sapiens
ggggggccttccccgcgcagagctccgaccgcgggcggcccaggggcgggcgcgccgctgcatccccatcctcgtcgtcgcccggcacagcgcgagcgggcgagcggcgcgggcggccggagcgccgaggcccggccatggccaccaccagcaccacgggctccaccctgctgcagcccctcagcaacgccgtgcagctgcccatcgaccagcccaatgatgatcattactcagaagatcactagtttggcttgcgaaattcatgatgggatgtttcggaaggatgaagaactgacttcctcacagagggatttagctgtaaggcatgccaagcttactggagtatttgagttacaactgtaacttcatggggatcctggcaggcccactttgctcttacaaagactacattactttcattgaaggcagatcataccatatcacacaatctggtgaaaatggaaaagaagagacacagtatgaaagaacagagccatctccaaatactgcggttgttcagaagctcttagtttgtgggctgtccttgttatttcacttgaccatctgtacaacattacctgtggagtacaacattgatgagcattttcaagctacagcttcgtggccaacaaagattatctatctgtatatctctcttttggctgccagacccaaatactattttgcatggacgctagctgatgccattaataatgctgcaggctttggtttcagagggtatgacgaaaatggagcagctcgctgggacttaatttccaatttgagaattcaacaaatagagatgtcaacaagtttcaagatgtttcttgataattggaatattcagacagctctttggctcaaaagggtgtgttatgaacgaacctccttcagtccaactatccagacgttcattctctctgccatttggcacggggtatacccaggatattatctaacgtttctaacaggggtgttaatgacattagcagcaagagctatgagaaataactttagacattatttcattgaaccttcccaactgaaattattttatgatgttataacatggatagtaactcaagtagcaataagttacacagttgtgccatttgtgcttctttctataaaaccatcactcacgttttacagctcctggtattattgcctgcacattcttggtatcttagtattattgttgttgccagtgaaaaaaactcaaagaagaaagaatacacatgaaaacattcagctctcacaatccaaaaagtttgatgaaggagaaaattctttgggacagaacagtttttctacaacaaacaatgtttgcaatcagaatcaagaaatagcctcgagacattcatcactaaagcagtgatcgggaaggctctgagggctgttttttttttttgatgttaacagaaaccaatcttagcaccttttcaaggggtttgagtttgttggaaaagcagttaactggggggaaatggacagttatagataaggaatttcctgtacaccagattggaaatggagtgaaacaagccctcccatgccatgtccccgtgggccacgccttatgtaagaatatttccatatttcagtgggcactcccaacctcagcacttgtccgtagggtcacacgcgtgccctgttgctgaatgtatgttgcgtatcccaaggcactgaagaggtggaaaaataatcgtgtcaatctggatgatagagagaaattaacttttccaaatgaatgtcttgccttaaaccctctatttcctaaaatattgttcctaaatggtattttcaagtgtaatattgtgagaacgctactgcagtagttgatgttgtgtgctgtaaaggattttaggaggaatttgaaacaggatatttaagagtgtggatatttttaaaatgcaataaacatctcagtatttgataaaaaaaaaaaaaaaaaaaaaaaaaaaaaa

SEQ ID NO: 469 - DNA, 1227 bp, Homo sapiens
atctagaggagggccgtctgtgaggccactacccctccagcaactgggaggtgggactgtcagaagctggcccagggtggtggtcagctgggtcagggacctacggcacctgctggaccacctcgccttctccatcgaagcagggaagtgggagcctcgagccctcgggtggaagctgaccccaagccacccttcacctggacaggatgagagtgtcaggtgtgcttcgcctcctggccctcatctttgccatagtcacgacatggatgtttattcgaagctacatgagcttcagcatgaaaaccatccgtctgccacgctggctggcagcctcgcccaccaaggagatccaggttaaaaagtacaagtgtggcctcatcaagccctgcccagccaactactttgcgtttaaaatctgcagtggggccgccaacgtcgtgggccctactatgtgctttgaagaccgcatgatcatgagtcctgtgaaaaacaatgtgggcagaggcctaaacatcgccctggtgaatggaaccacgggagctgtgctgggacagaaggcatttgacatgtactctggagatgttatgcacctagtgaaattccttaaagaaattccggggggtgcactggtgctggtggcctcctacgacgatccagggaccaaaatgaacgatgaaagcaggaaactcttctctgacttggggagttcctacgcaaaacaactgggcttccgggacagctgggtcttcataggagccaaagacctcaggggtaaaagcccctttgagcagttcttaaagaacagcccagacacaaacaaatacgagggatggccagagctgctggagatggagggctgcatgcccccgaagccattttagggtggctgtggctcttcctcagccaggggcctgaagaagctcctgcctgacttaggagtcagagcccggcaggggctgaggaggaggagcagggggtgctgcgtggaaggtgctgcaggtccttgcacgctgtgtcgcgcctctcctcctcggaaacagaaccctcccacagcacatcctacccggaagaccagcctcagagggtccttctggaaccagctgtctgtggagagaatggggtgctttcgtcagggactgctgacggctggtcctgaggaaggacaaactgcccagacttgagcccaattaaattttatttttgctggttttgaaaaaaaaaaaaaaa

SEQ ID NO: 470 - DNA, 1684 bp, Homo sapiens
agagaggagcgggccgaggactccagcgtgcccaggtctggcatcctgcacttgctgccctctgacacctgggaagatggccggcccgtggaccttcacccttctctgtggtttgctggcagccaccttgatccaagccaccctcagtcccactgcagttctcatcctcggcccaaaagtcatcaaagaaaagctgacacaggagctgaaggaccacaacgccaccagcatcctgcagcagctgccgctgctcagtgccatgcgggaaaagccagccggaggcatccctgtgctgggcagcctggtgaacaccgtcctgaagcacgtcatctggctgaaggtcatcacagctaacatcctccagctgcaggtgaagccctcggccaatgaccaggagctgctagtcaagatccccctggacatggtggctggattcaacacgcccctggtcaagaccatcgtggagttccacatgacgactgaggcccaagccaccatccgcatggacaccagtgcaagtggccccacccgcctggtcctcagtgactgtgccaccagccatgggagcctgcgcatccaactgctgcataagctctccttcctggtgaacgccttagctaagcaggtcatgaacctcctagtgccatccctgcccaatctagtgaaaaaccagctgtgtcccgtgatcgaggcttccttcaatggcatgtatgcagacctcctgcagctggtgaaggtgcccatttccctcagcattgaccgtctggagtttgaccttctgtatcctgccatcaagggtgacaccattcagctctacctgggggccaagttgttggactcacagggaaaggtgaccaagtggttcaataactctgcagcttccctgacaatgcccaccctggacaacatcccgttcagcctcatcgtgagtcaggacgtggtgaaagctgcagtggctgctgtgctctctccagaagaattcatggtcctgttggactctgtgcttcctgagagtgcccatcggctgaagtcaagcatcgggctgatcaatgaaaaggctgcagataagctgggatctacccagatcgtgaagatcctaactcaggacactcccgagttttttatagaccaaggccatgccaaggtggcccaactgatcgtgctggaagtgtttccctccagtgaagccctccgccctttgttcaccctgggcatcgaagccagctcggaagctcagttttacaccaaaggtgaccaacttatactcaacttgaataacatcagctctgatcggatccagctgatgaactctgggattggctggttccaacctgatgttctgaaaaacatcatcactgagatcatccactccatcctgctgccgaaccagaatggcaaattaagatctggggtcccagtgtcattggtgaaggccttgggattcgaggcagctgagtcctcactgagcaaggatgcccttgtgcttactccagcctccttgtggaaacccacctctcctgtctcccagtgaagacttggatggcagccatcagggaaggctgggtcccagctgggagtatgggtgtgagctctatagaccatccctctctgcaatcaataaacacttgcctgtgaaaaaaaaaaaaaaaaaagaaaaaaaaaaaaaaaaaaaaaaaaaaaaaaa

SEQ ID NO: 471 - DNA, 1049 bp, Homo sapiens
ggagtgggggagagagaggagaccaggacagctgctgagacctctaagaagtccagatactaagagcaaagatgtttcaaactgggggcctcattgtcttctacgggctgttagcccagaccatggcccagtttggaggcctgcccgtgcccctggaccagaccctgcccttgaatgtgaatccagccctgcccttgagtcccacaggtcttgcaggaagcttgacaaatgccctcagcaatggcctgctgtctgggggcctgttgggcattctggaaaaccttccgctcctggacatcctgaagcctggaggaggtacttctggtggcctccttgggggactgcttggaaaagtgacgtcagtgattcctggcctgaacaacatcattgacataaaggtcactgacccccagctgctggaacttggccttgtgcagagccctgatggccaccgtctctatgtcaccatccctctcggcataaagctccaagtgaatacgcccctggtcggtgcaagtctgttgaggctggctgtgaagctggacatcactgcagaaatcttagctgtgagagataagcaggagaggatccacctggtccttggtgactgcacccattcccctggaagcctgcaaatttctctgcttgatggacttggccccctccccattcaaggtcttctggacagcctcacagggatcttgaataaagtcctgcctgagttggttcagggcaacgtgtgccctctggtcaatgaggttctcagaggcttggacatcaccctggtgcatgacattgttaacatgctgatccacggactacagtttgtcatcaaggtctaagccttccaggaaggggctggcctctgctgagctgcttcccagtgctcacagatggctggcccatgtgctggaagatgacacagttgccttctctccgaggaacctgccccctctcctttcccaccaggcgtgtgtaacatcccatgtgcctcacctaataaaatggctcttcttctgcaaaaaaaaaaaaaaaaaaaaaaaaaaaaa

SEQ ID NO: 472 - DNA, 1094 bp, Homo sapiens
ggagtgggggagagagaggagaccaggacagctgctgagacctctaagaagtccagatactaagagcaaagatgtttcaaactgggggcctcattgtcttctacgggctgttagcccagaccatggcccagtttggaggcctgcccgtgcccctggaccagaccctgcccttgaatgtgaatccagccctgcccttgagtcccacaggtcttgcaggaagcttgacaaatgccctcagcaatggcctgctgtctgggggcctgttgggcattctggaaaaccttccgctcctggacatcctgaagcctggaggaggtacttctggtggcctccttgggggactgcttggaaaagtgacgtcagtgattcctggcctgaacaacatcattgacataaaggtcactgacccccagctgctggaacttggccttgtgcagagccctgatggccaccgtctctatgtcaccatccctctcggcataaagctccaagtgaatacgcccctggtcggtgcaagtctgttgaggctggctgtgaagctggacatcactgcagaaatcttagctgtgagagataagcaggagaggatccacctggtccttggtgactgcacccattcccctggaagcctgcaaatttctctgcttgatggacttggccccctccccattcaaggtcttctggacagcctcacagggatcttgaataaagtcctgcctgagttggttcagggcaacgtgtgccctctggtcaatgaggttctcagaggcttggacatcaccctggtgcatgacattgttaacatgctgatccacggactacagtttgtcatcaaggtctaagccttccaggaaggggctggcctctgctgagctgggtcttcccccaacagaactatttcttgctgctcaatccattccctctggcccagcttcccagtgctcacagatggctggcccatgtgctggaagatgacacagttgccttctctccgaggaacctgccccctctcctttcccaccaggcgtgtgtaacatcccatgtgcctcacctaataaaatggctcttcttatgcaaaaaaaaaaaaaaaaaaa

SEQ ID NO: 473 - DNA, 1628 bp, Homo sapiens; identical to SEQ ID NO: 449

SEQ ID NO: 474 - DNA, 3781 bp, Homo sapiens
gggccggctcgcgggcgctgccagtctcgggcggcggtgtccggcgcgcgggcggcctgctgggcgggctgaagggttagcggagcacgggcaaggcggagagtgacggagtcggcgagcccccgcggcgacaggttctctacttaaaagacaatgactactgatgaaggtgccaagaacaatgaagaaagccccacagccactgttgctgagcagggagaggatattacctccaaaaaagacaggggagtattaaagattgtcaaaagagtggggaatggtgaggaaacgccgatgattggagacaaagtttatgtccattacaaaggaaaattgtcaaatggaaagaagtttgattccagtcatgatagaaatgaaccatttgtctttagtcttggcaaaggccaagtcatcaaggcatgggacattggggtggctaccatgaagaaaggagagatatgccatttactgtgcaaaccagaatatgcatatggctcggctggcagtctccctaaaattccctcgaatgcaactctcttttttgagattgagctccttgatttcaaaggagaggatttatttgaagatggaggcattatccggagaaccaaacggaaaggagagggatattcaaatccaaacgaaggagcaacagtagaaatccacctggaaggccgctgtggtggaaggatgtttgactgcagagatgtggcattcactgtgggcgaaggagaagaccacgacattccaattggaattgacaaagctctggagaaaatgcagcgggaagaacaatgtattttatatcttggaccaagatatggttttggagaggcagggaagcctaaatttggcattgaacctaatgctgagcttatatatgaagttacacttaagagcttcgaaaaggccaaagaatcctgggagatggataccaaagaaaaattggagcaggctgccattgtcaaagagaagggaaccgtatacttcaagggaggcaaatacatgcaggcggtgattcagtatgggaagatagtgtcctggttagagatggaatatggtttatcagaaaaggaatcgaaagcttctgaatcatttctccttgctgcctttctgaacctggccatgtgctacctgaagcttagagaatacaccaaagctgttgaatgctgtgacaaggcccttggactggacagtgccaatgagaaaggcttgtataggaggggtgaagcccagctgctcatgaacgagtttgagtcagccaagggtgactttgagaaagtgctggaagtaaacccccagaataaggctgcaagactgcagatctccatgtgccagaaaaaggccaaggagcacaacgagcgggaccgcaggatatacgccaacatgttcaagaagtttgcagagcaggatgccaaggaagaggccaataaagcaatgggcaagaagacttcagaaggggtcactaatgaaaaaggaacagacagtcaagcaatggaagaagagaaacctgagggccacgtatgacgccacgccaaggagggaagagtcccagtgaactcggcccctcctcaatgggctttcccccaactcaggacagaacagtgtttaatgtaaagtttgttatagtctatgtgattctggaagcaaatggcaaaaccagtagcttcccaaaaacagcccccctgctgctgcccggagggttcactgaggggtggcacgggaccactccaggtggaacaaacagaaatgactgtggtgtggagggagtgagccagcagcttaagtccagctcatttcagtttctatcaaccttcaagtatccaattcagggtccctggagatcatcctaacaatgtggggctgttaggttttacctttgaactttcatagcactgcagaaaccttttaaaaaaaaatgcttcatgaatttctcctttcctacagttgggtagggtaggggaaggaggataagcttttgttttttaaatgactgaagtgctataaatgtagtctgttgcatttttaaccaacagaacccacagtagaggggtctcatgtctccccagttccacagcagtgtcacagacgtgaaagccagaacctcagaggccacttgcttgctgacttagcctcctcccaaagtccccctcctcagccagcctccttgtgagagtggctttctaccacacacagcctgtccctgggggagtaattctgtcattcctaaaacacccttcagcaatgataatgagcagatgagagtttctggattagcttttcctattttcgatgaagttctgagatactgaaatgtgaaaagagcaatcagaattgtgctttttctcccctcctctattccttttagggaataatattcaatacacagtacttcctcccagcattgctactgctcagcttcttctttcattctaatccttgctattaagaatttaagacttgtgcttacaatatttttgacctggagtggatctatttacatagtcatttaggatccatgcagctttttttgtctttttaagattattggctcataagcatatgtatactggtttatggaactttatttacactcctctatcatgcaaaaaaattttgactttttagtactaagcttaatttttaaaaacaaaatctgtagtgttgacaaataaatagttgctcttctacactaggggtttcacctgcaggtttgacacgcagttgctcgcttttcctgccctgtcaagcttctctgttctggcgtgagttgtgaaagagttgaagacagcttcccatgccggtacacagccagtagcctaaatctccagtacttgagctgaccattgaactagggcaagtcttaaatgtgtacatgtagttgaatttcagtccttacgggtaaacagattgagcatggctctctattccctcagcctaagaaacactcatgggaatgcatttggcaacccaaggaaccatttgcttaaacctggaacatctcacctttttaaatcctaaaaaacactggcagttatattttaaattagtttttatttttatgatggttttatcaaaagacttttattattagattgggacccccttcaaacctaaaaatcaagttatttccttttataatacttttcttccccatggaacaaatgggatcaatttgtgagttttttcctttaatgataactaaaatccctctaatttctcatttatgcttttgtcttttttatgaaatatttcttttaaaagccccagtctcacctacgaaatatgaagagcaaaagctgattttgcttacttgctaaactgttgggaaagctctgtagagcatggttccagtgaggccaagattgaaatttgatactaaaaaggccacctagctttttgcagataacaaacaagaaagctattccaagactcagatgatgccagctgtctcccacgtgtgtattatggttcaccagggggaactggcaaaagtgtgtgtggggaggggaagggtgtgtgagtggttctgagcaaataactacagggtgcccattaccactcaagaagacacttcacgtattcttgtatcaaattcaataatcttaaacaatttgtgtagaagtccacagacatctttcaaccaccttttaggctgcatatggattgccaagtcagcatatgaggaattaaagacattgtttttaaaaaaaaaaaatcatttagatgcacttttttgtgtgttctttaaataaatccaaaaaaaatgtgaaaaaaaaaa

SEQ ID NO: 475 - DNA, 895 bp, Homo sapiens
gcggagcgaggctggaggcgcgggagggcagcgagaggttcgcgggtgcagcgcacaggagaccatgtccgggggcagcagctgcagccagaccccaagccgggccatccccgccactcgccgggtggtgctcggcgacggcgtgcagctcccgcccggggactacagcacgacccccggcggcacgctcttcagcaccaccccgggaggtaccaggatcatctatgaccggaaattcctgatggagtgtcggaactcacctgtgaccaaaacacccccaagggatctgcccaccattccgggggtcaccagcccttccagtgatgagccccccatggaagccagccagagccacctgcgcaatagcccagaagataagcgggcgggcggtgaagagtcacagtttgagatggacatttaaagcaccagccatcgtgtggagcactaccaaggggcccctcagggccttcctgggaggagtcccaccagccaggccttatgaaagtgatcatactgggcaggcgttggcgtggggtcggacaccccagccctttctccctcactcagggcacctgccccctcctcttcgtgaacaccagcagatacctccttgtgcctccactgatgcaggagctgccaccccaaggggagtgacccctgccagcacaccctgcagccaagggccaggaagtggacaagaacgaacccttccttccgaatgatcagcagttccagcccctcgctgctgggggcgcaaccaccccttccttaggttgatgtgcttgggaaagctccctccccctccttccccaagagaggaaataaaagccaccttcgccctaggaaaaaaaaaaaaaaaaaaaaaaaaaaaaaaaaaaaaaaaaaaaaaaaaaaa

SEQ ID NO: 476 - DNA, 11554 bp, Homo sapiens
ccacaccgagcaccagcttctccgacgccgggaagccgctgtcgccgccgctacctctccctgttgccgccgcctcagatctcttcatgccgctgtaagctcggaggccaaggatgcggagtaggcttcccccagcgcttgccgccctgggcgcggccctgctcctgtcttccattgaggcagaagttgacccaccttcagacttgaattttaaaattatagatgaaaatactgttcatatgtcatgggcaaaaccagttgatccaattgtgggttacagaataacggtggaccctacaacggatgggcctactaaagaatttaccctttcagctagtaccactgaaactttattgtcagaacttgtacctgaaacagagtatgtggtgacaataacttcatatgatgaagtagaagaaagtgtaccagttataggacaactaacaattcaaacaggtagttcgacaaagccagtggagaagaaacctggaaaaaccgagatacaaaaatgctctgtcagtgcctggactgatttggttttcctcgtggatggctcttggagtgtgggaagaaataatttcaagtacattttagacttcattgctgctcttgtgtctgcttttgacattggggaagagaagacaagagttggagttgttcaatacagctctgataccaggactgaatttaacttaaatcagtactaccaaagggatgaacttcttgctgcaataaaaaaaattccatataaaggtggcaacacaatgacaggggatgccattgattatttagttaaaaatactttcacggaatctgctggggcaagagttggctttcctaaagtggcaattattattacggatggaaaatcccaggatgaagtggaaattccagcaagagagcttcgtaatgttggagttgaagttttctccttgggcattaaagctgcagatgcaaaagaactcaaacaaattgcctccacaccttcactgaaccatgttttcaatgtggccaactttgatgcaattgtggatattcagaatgagatcatctcccaggtgtgctcaggtgttgatgaacaacttggtgaattggttagtggagaagaagttgttgagcctccttcaaatttgattgccatggaagtctcttcaaaatatgttaagctaaattggaatccatctcctagtccagtgactggctacaaagtcatcctcacaccaatgactgcaggaagccgacagcacgctctgagtgtggggcctcagacaaccacgctcagtgttcgcgacctctcagcagacacagaataccagatcagtgtttccgccatgaagggaatgacatccagtgaacccatttcaataatggagaagactcagccaatgaaagttcaagtggaatgctcacgtggtgtggatataaaagccgatattgtgtttttggttgatggctcctatagcattgggattgcaaactttgttaaagttagagcctttttggaagttcttgtaaaaagttttgaaatttcaccaaatagggtccagattagtcttgtgcaatacagccgggatcctcatactgagttcactttgaaaaaattcaccaaagttgaagatataattgaagcaataaacaccttcccttacagaggaggatctacaaatactggcaaagcaatgacttatgtcagagagaaaatatttgtgcctagcaagggatcaagaagcaatgtgccaaaggtcatgattcttatcacggatgggaaatcatcagatgctttcagagatcctgcgataaaactgaggaattcagatgttgaaatctttgcagttggtgtgaaggatgccgttcgctcagaattggaagctattgcctctcctcctgcagagacccatgtgttcacagtggaagattttgatgcttttcagaggatatcttttgaactcacacagtctatctgccttagaattgagcaagaattggcagctataaagaagaaagcttacgtccctccaaaggatcttagtttttcagaagtgacttcttatggtttcaaaaccaactggtctccagctggagaaaatgttttttcatatcacatcacctacaaggaagcggctggggatgatgaggtcactgtggtggagccagcatcgagcaccagtgttgttctcagcagcctgaagccagagaccttgtatttggtcaatgtgactgcggagtatgaggatggcttcagcattcccttagctggagaggagaccaccgaagaagtaaaaggagcacctcgaaacctaaaggtgacagatgagactacagatagtttcaaaattacttggactcaagctccagggagagttttaagatatcgaattatatatagaccagttgctggtggagagagcagagaagttaccaccccacccaatcagaggaggagaacactggagaacttgattccagacacgaaatatgaagtatctgtaattcctgaatatttctcaggacctggtactccattaactggaaatgcagccactgaagaagttagagggaatccaagagacttaagagtttctgaccctacgacgtctactatgaaattatcttggagtggggcaccaggaaaagtgaaacagtatctcgtcacatataccccagtggcagggggtgaaactcaagaggtcactgtgaggggagatacaaccaatacggtgctgcagggattgaaggaagggacacaatacgccttatctgtgacagccttgtatgcgtctggggctggagacgccctctttggtgaaggaacaacacttgaagaacgtggttctcctcaagatttagttactaaagacatcactgacacatcaattggggcttattggacatctgctccaggaatggttcgcggttacagggtctcatggaaatcactttatgatgatgttgacactggagagaaaaatctgcctgaagatgcaattcatacgatgatagaaaatctgcagccagagaccaaatacagaatttcagtatttgccacttacagcagtggagaaggagaacctttgactggagatgccacaactgaattatctcaagattccaaaaccctgaaagtagatgaagaaacagaaaacacaatgagagttacatggaaaccagcaccagggaaagtcgtcaactaccgtgttgtctatcgccctcatgggagagggaagcaaatggttgctaaggtgccccccacagtcacttcgacagtgttaaagcgacttcagccacagaccacatatgacatcacagttcttcctatttacaagatgggagaaggaaagcttaggcaaggatcaggaacaacagcttctcggtttaagtctcctagaaacctcaaaacatctgacccaaccatgtcaagcttccgagtgacttgggagcctgcccctggggaagtgaagggttataaagtcacattccaccctacgggggatgacagaagactgggggagttagtggttggaccctatgacaacacagttgttttggaggaacttagggctggtaccacctataaagtaaatgtttttggaatgtttgatggaggagaaagctcaccacttgttggacaagaaatgacaaccctttccgacacaactgttatgccaattttatcttctgggatggagtgtctcaccagagctgaggcagacattgtgttgctggtggatggatcatggagcatcggccgggcaaattttagaaccgtgaggagtttcatttctcgtattgtggaagtctttgacattggccccaaaagagtacaaattgctcttgctcagtatagtggggatcccagaacagagtggcagttaaatgcacacagagacaagaagagcttgttgcaagctgtggcaaacttgccgtacaaaggaggcaatactctcacaggcatggctttgaatttcattcgccaacagaacttcaggacccaagctggcatgagacctcgagctcgaaaaattggtgtgctcattactgatggaaaatcacaagacgatgttgaagcaccttcaaagaaactcaaggatgagggagtggagctgtttgctattggtattaaaaatgctgatgaagtcgaattaaagatgattgcaactgatcctgatgatacccatgcatacaatgtggcagattttgagtcactctccaggatagtggatgatctcaccattaatttgtgtaacagtgtcaaaggtccaggtgatttggaagcaccttctaacttagttatttctgagcgaacccatcgttcttttagagtgagctggacaccaccttctgacagtgtggatcgatataaggtggaatactatccagtttctggagggaaacgtcaagaattttatgtgagtcgaatggaaactagcacagtgctgaaagatctgaaacctgaaactgaatatgttgtcaatgtgtattctgtggtagaagatgaatatagtgagcctctgaaggggacagaaaaaaccttgccagtgcctgtagtcagcctgaatatttatgatgttggccctaccaccatgcatgtgcagtggcagcctgtgggaggagctactggctacatcttgtcatacaaacctgttaaggacacagagccaacaagacccaaagaggtgcgtttggggccaacagtgaatgacatgcagctgactgaccttgttcccaacacggagtatgcagtcacagtccaggctgtcctgcacgacctcactagtgaacctgtcactgttcgggaagtcaccttgcctttacccagacctcaggatctgaaactcagagatgtgactcacagcactatgaatgtcttttgggaacctgtgcctggaaaagtgcgtaaatatattgttcgatacaaaacaccagaagaggatgtcaaagaggtagaggtggacagatcagagaccagcacttccctcaaagacctcttctcacagaccttgtacacagtcagcgtttctgcagtacatgacgagggggagtctcctccagtgactgctcaagaaactacccgacccgtgccagccccaacaaacttaaagattactgaagtaacatcagagggtttcagagggacttgggatcatggagcttcagatgtgtctctctacagaataacttgggcaccttttggaagctcagataagatggagaccatcttaaatggagatgaaaacactttggtgttcgaaaacctgaaccccaacaccatctatgaagtttccattactgccatctatcctgatgagtcagaaagtgatgacctgattggcagtgagcgcactctgcctatcttaacaacacaagctcccaaaagtggcccacgaaaccttcaagtgtacaatgcaacatctaacagcctgactgttaagtgggatcctgctagtggtcgtgtgcagaaatataggatcacttatcagccttccacaggggaaggcaatgagcaaacgaccacaataggaggacggcagaacagtgtggtcctgcagaaactgaagccagacactccttacactatcaccgtatcctctctgtatcctgatggtgaaggaggtcggatgacgggaagaggcaagaccaaacctctaaacactgtaaggaacctgagagtgtatgacccttctaccagcaccttgaatgtccgctgggaccatgcagagggaaatcctcgtcagtacaagctcttctatgcaccagcagcaggtggtccagaggaactggtaccaatccccgggaataccaattatgccattcttaggaatctgcagccagatacctcatacactgtgactgtagttcccgtttatactgaaggtgatgggggacgcacatcagatactggaaggacattgatgagaggactggcaagaaatgtccaagtatacaatcctacacctaacagcctcgatgttcgctgggaccctgctccaggacctgtgctgcaatatcgcgttgtgtattctcctgtggatggcacaagaccctcagaatctatagtagtgccaggaaacacgcgcatggtgcatctggagcggctgattccggacacactctattccgtgaaccttgtggctctgtactcggatggagagggaaatcccagccctgcccagggccgaacgctaccacgcagtggaccaaggaacctgagagtctttggtgaaacaaccaatagcctctcggtagcctgggatcatgctgatgggccagttcagcagtacaggatcatctattctcccactgttggtgatccaattgatgaatataccacagtcccaggcagaagaaacaatgtaatactgcagcccctgcaacctgacactccatataaaattactgttattgctgtttatgaagatggagatggtggccatctaacaggaaatggaagaactgtgggactccttcctcctcagaacatacacatctctgacgaatggtatacaagattcagggtgtcctgggatccttcaccttctccagttcttggatataaaatagtatataagccagtgggttccaatgagcccatggaagcctttgttggagaaatgacatcatataccttacacaatctcaatcccagcaccacctacgatgtgaatgtttatgctcaatatgattctggactcagtgtccccttgacagatcaaggcactacattatatttaaatgtaacagatctgaaaacttaccagattgggtgggatacattctgtgtcaaatggtcacctcaccgggcagccacctcctacaggctaaaactaagccctgcagatggaacaaggggacaagaaattacagtgcgtggatcagaaaccagtcactgcttcactggcctttcaccagacactgattatggtgtcactgtttttgtgcagacaccaaatctcgagggaccaggagtctctgttaaagaacataccactgtgaaaccaacagaagcccctacagagccacccacacctcctccccctcccaccattccaccagcccgggatgtatgcaaaggggccaaggcagatattgtgttcttgactgatgcctcctggagcattggggacgataattttaacaaagttgtaaaattcatcttcaatactgtgggaggctttgatgaaatcagtcctgctgggattcaggtttcatttgtgcaatacagcgatgaggtcaagtctgagttcaagctgaacacgtacaatgacaaggccctagcccttggggccctccagaatattaggtacagaggaggaaacacaagaacaggcaaggccctcacgtttatcaaggagaaagtcttgacttgggagagcggcatgaggaagaatgtccctaaggtgttggttgtggtcacggacggtcggtcccaggatgaggtcaagaaggcggctttggtcatccagcagtcagggttcagtgtctttgtagttggtgtggctgatgtcgactacaatgagcttgccaacattgccagcaaaccaagtgaacggcacgtgttcattgtggacgactttgaatcttttgagaagatcgaagacaatcttattacatttgtttgtgaaactgccacttcaagttgtcctctcatttatttggatggctacacctcaccaggttttaaaatgcttgaagcatacaacctgacagaaaagaattttgcttctgtacaaggagtatctttggagtcagggtctttccccagctactcagcatacaggattcagaagaatgcgtttgtgaatcagcctacagcagacctacacccaaatggactccctccttcatacacgattatattattattcagacttctcccagaaactcccagtgacccttttgcaatttggcaaatcacagacagagactacaaaccacaagttggagtgattgcagatccttctagcaagacgttatcattctttaacaaggatacaagaggcgaggtgcaaactgttacatttgacacagaagaagtaaagacattattttatggaagttttcacaaggttcatattgtagtgacctcaaaaagtgttaagatttacattgactgctatgaaattatagaaaaagacatcaaggaagctggaaatataacaactgatggttatgaaattcttggaaaactccttaaaggggaaaggaaatcagccgcattccaaatccagagttttgacattgtctgcagtccagtgtggaccagtagagacagatgctgtgatattccctctaggagagatgagggaaaatgccctgcttttccaaattcttgcacatgtacacaggacagcgttggacctccaggacctccaggccctgcaggaggacctggtgctaaaggtcccagaggtgaaagaggtatcagtggggcaattgggccccctggtcctcgtggagacataggtcctccaggcccccagggtcctccaggccctcagggacccaatggactctctattccgggagagcaaggtcgccaagggatgaaaggtgatgctggagagccaggacttccaggccgaacaggaaccccaggattacctggcccaccaggaccaatgggacctccaggagacagaggcttcactggaaaagacagtgcaatgggacccaggggcccaccagggcggccgggaagcccaggctccccaggagtcacaggaccaagtgggaagccaggaaaacctggagatcatggcagaccaggtccatctgggttgaaaggagaaaaaggtgataggggagacattgcttcccagaacatgatgcgagcagttgcaagacaagtctgtgaacaattgataagtggtcagatgaacagattcaatcagatgctgaatcagattccaaatgattaccagtccagtcgcaaccagccaggcccgccgggtccaccgggacctcctggtagcgcaggagccagaggagaacctgggcctggggggcggccaggcttcccgggcacaccagggatgcagggaccccctggggaacgaggtttgccaggagagaaaggtgaaaggggtactggatcttcaggacctcgggggctgcctgggcccccaggtccacaaggagaatccagaacaggtccaccagggtccacaggttcaagaggtccccctggcccccctggccgtcctggaaactcaggtatccagggccccccaggtcctcctggatactgtgattcttctcagtgtgccagcatcccatacaacgggcaaagctatccaggttccggctaacacattttctaagtcgccagtgctgcttacagtttgaatacatgaaaatcctgtttctgagatgtttgcgcacgtgcttattaggaaatgagtctgtatggaaatctcaccacagataatggttaacgaaccgggtcgacatcacaaaggagggtggagactctttttactaacttgaatgagacaaaagcagtggtgtcagtttataatcctgatgcatttcagtaataatgtagaaaaacattattttaaaaaagttccaacacacagccatgaggagccatgaggagcctcagttttgaaagaggtgcataataaaactactaaccagaggagtctatgccattttaagaaaaacaattaacctggttaaagagaaatgtcttatgtaaataataaactaattgtggcttgtaaatgatttgtatgtgatcctgtcgactaaaatcacttaacaattctacaataagcttctgcatcaaagcctgccgcttgctctatgccggaataacaccaaatggaatctcctcatctcttgcttgttagcgatgtgtctgattcagggcatctgtctttttgttacttttttgtccgtgtcctctcatttgggttttgtaactgcaattttcaaaccaaagtttaaaatcaccttttcttcctgttttgctgtagtcactggtgttcctcacccaccagctgtaactcagtttgtgtgaggtacagccacagaagatgtcatgtactgtatattacctggtgatagttgcttttcaccccccgagttcagtttctaggagccaatgaaacttcccctcacctcctcatctttccaagttgttctttgaattgaggagtttgaaggcataaacagttacttggggatttgcgaaaatcctacttagttactgcgtttacagttctttggcccagtctctgacccttcccaagtatttgtgcaatgattgtgtttactgctggatttttgaaggtttttttttttaagaaagtgccatttcattatttgattatcaccaaattatctggaaataattgggacattgtaacttatctatttatagttatgagattaagactggagtgccatcaccgcgggtgatgatttagcttttgctgtgtgtgtgtgtgtgtgtgtgccttccaaatcatgccataattgtaatgttgaatcggacagagccttacgtgcccgagggcggggcctacctgcctgagcgcgagcccttcatcgtgccggtggagcccgagcggacagcggaatacgaggactacggcgcagacgagcctgcagaggagcctcctgagccccaccggcgctggcggcgcgccctgccccacggacccgggcagtgaaccagagatcacgcgccgcgccgcgaggcttgggggaggtgttgaaattctcatttacaggtcagatagagcagtgtacgtcttttctgaggtgtttcttccagcgttgctcatccaggagtaccctttctgattgtagagaaccttgtttctgcaggaagcctagctccaagcacgcagtctgtagacatttttgcctttgcccttgaaatgcttgcaaaatactttgttaacaaaagctgcaaagagagaacatgccgtgtgcctttagttagcacagcgggcagcctcagtgaaactcttaggttaagcagttaagtcctggaacccagagctgctgtgtatttcgagcgggcagtttatcttttgctatacttattttcaattcaattacaccacgattcaaataattcccctcctaaaaccaaaaaggagggaaacgtcaactccattgcaattacttatcttcctcttctatctctgttatacgccggggcatagaatgctcgtatacatctctttaacaaccacaaaccttaagccatgtagatgaagttagtgcatcaacgggatacagttccatattgccttaaacctccttgttttagacacactaacatttataccaaattgcagattattctgcagagagggaattgcatgtttgtgttgtatatttagtatgaacttttttcagaatataatatttcttagttatcaaaagtagttggaaaacatttgcaagactatgaacatagaattgctgcttttatattttaactgcagattgtgaatttcactgccttatattatttatttctgaaacaaaagaggcatttttcaataaaactactgaaaatttgaaaaaaaaaaaaaaa

SEQ ID NO: 477 - DNA, 8062 bp, Homo sapiens
ccacaccgagcaccagcttctccgacgccgggaagccgctgtcgccgccgctacctctccctgttgccgccgcctcagatctcttcatgccgctgtaagctcggaggccaaggatgcggagtaggcttcccccagcgcttgccgccctgggcgcggccctgctcctgtcttccattgaggcagaagggatggagtgtctcaccagagctgaggcagacattgtgttgctggtggatggatcatggagcatcggccgggcaaattttagaaccgtgaggagtttcatttctcgtattgtggaagtctttgacattggccccaaaagagtacaaattgctcttgctcagtatagtggggatcccagaacagagtggcagttaaatgcacacagagacaagaagagcttgttgcaagctgtggcaaacttgccgtacaaaggaggcaatactctcacaggcatggctttgaatttcattcgccaacagaacttcaggacccaagctggcatgagacctcgagctcgaaaaattggtgtgctcattactgatggaaaatcacaagacgatgttgaagcaccttcaaagaaactcaaggatgagggagtggagctgtttgctattggtattaaaaatgctgatgaagtcgaattaaagatgattgcaactgatcctgatgatacccatgcatacaatgtggcagattttgagtcactctccaggatagtggatgatctcaccattaatttgtgtaacagtgtcaaaggtccaggtgatttggaagcaccttctaacttagttatttctgagcgaacccatcgttcttttagagtgagctggacaccaccttctgacagtgtggatcgatataaggtggaatactatccagtttctggagggaaacgtcaagaattttatgtgagtcgaatggaaactagcacagtgctgaaagatctgaaacctgaaactgaatatgttgtcaatgtgtattctgtggtagaagatgaatatagtgagcctctgaaggggacagaaaaaaccttgccagtgcctgtagtcagcctgaatatttatgatgttggccctaccaccatgcatgtgcagtggcagcctgtgggaggagctactggctacatcttgtcatacaaacctgttaaggacacagagccaacaagacccaaagaggtgcgtttggggccaacagtgaatgacatgcagctgactgaccttgttcccaacacggagtatgcagtcacagtccaggctgtcctgcacgacctcactagtgaacctgtcactgttcgggaagtcaccttgcctttacccagacctcaggatctgaaactcagagatgtgactcacagcactatgaatgtcttttgggaacctgtgcctggaaaagtgcgtaaatatattgttcgatacaaaacaccagaagaggatgtcaaagaggtagaggtggacagatcagagaccagcacttccctcaaagacctcttctcacagaccttgtacacagtcagcgtttctgcagtacatgacgagggggagtctcctccagtgactgctcaagaaactacccgacccgtgccagccccaacaaacttaaagattactgaagtaacatcagagggtttcagagggacttgggatcatggagcttcagatgtgtctctctacagaataacttgggcaccttttggaagctcagataagatggagaccatcttaaatggagatgaaaacactttggtgttcgaaaacctgaaccccaacaccatctatgaagtttccattactgccatctatcctgatgagtcagaaagtgatgacctgattggcagtgagcgcactctgcctatcttaacaacacaagctcccaaaagtggcccacgaaaccttcaagtgtacaatgcaacatctaacagcctgactgttaagtgggatcctgctagtggtcgtgtgcagaaatataggatcacttatcagccttccacaggggaaggcaatgagcaaacgaccacaataggaggacggcagaacagtgtggtcctgcagaaactgaagccagacactccttacactatcaccgtatcctctctgtatcctgatggtgaaggaggtcggatgacgggaagaggcaagaccaaacctctaaacactgtaaggaacctgagagtgtatgacccttctaccagcaccttgaatgtccgctgggaccatgcagagggaaatcctcgtcagtacaagctcttctatgcaccagcagcaggtggtccagaggaactggtaccaatccccgggaataccaattatgccattcttaggaatctgcagccagatacctcatacactgtgactgtagttcccgtttatactgaaggtgatgggggacgcacatcagatactggaaggacattgatgagaggactggcaagaaatgtccaagtatacaatcctacacctaacagcctcgatgttcgctgggaccctgctccaggacctgtgctgcaatatcgcgttgtgtattctcctgtggatggcacaagaccctcagaatctatagtagtgccaggaaacacgcgcatggtgcatctggagcggctgattccggacacactctattccgtgaaccttgtggctctgtactcggatggagagggaaatcccagccctgcccagggccgaacgctaccacgcagtggaccaaggaacctgagagtctttggtgaaacaaccaatagcctctcggtagcctgggatcatgctgatgggccagttcagcagtacaggatcatctattctcccactgttggtgatccaattgatgaatataccacagtcccaggcagaagaaacaatgtaatactgcagcccctgcaacctgacactccatataaaattactgttattgctgtttatgaagatggagatggtggccatctaacaggaaatggaagaactgtgggactccttcctcctcagaacatacacatctctgacgaatggtatacaagattcagggtgtcctgggatccttcaccttctccagttcttggatataaaatagtatataagccagtgggttccaatgagcccatggaagcctttgttggagaaatgacatcatataccttacacaatctcaatcccagcaccacctacgatgtgaatgtttatgctcaatatgattctggactcagtgtccccttgacagatcaaggcactacattatatttaaatgtaacagatctgaaaacttaccagattgggtgggatacattctgtgtcaaatggtcacctcaccgggcagccacctcctacaggctaaaactaagccctgcagatggaacaaggggacaagaaattacagtgcgtggatcagaaaccagtcactgcttcactggcctttcaccagacactgattatggtgtcactgtttttgtgcagacaccaaatctcgagggaccaggagtctctgttaaagaacataccactgtgaaaccaacagaagcccctacagagccacccacacctcctccccctcccaccattccaccagcccgggatgtatgcaaaggggccaaggcagatattgtgttcttgactgatgcctcctggagcattggggacgataattttaacaaagttgtaaaattcatcttcaatactgtgggaggctttgatgaaatcagtcctgctgggattcaggtttcatttgtgcaatacagcgatgaggtcaagtctgagttcaagctgaacacgtacaatgacaaggccctagcccttggggccctccagaatattaggtacagaggaggaaacacaagaacaggcaaggccctcacgtttatcaaggagaaagtcttgacttgggagagcggcatgaggaagaatgtccctaaggtgttggttgtggtcacggacggtcggtcccaggatgaggtcaagaaggcggctttggtcatccagcagtcagggttcagtgtctttgtagttggtgtggctgatgtcgactacaatgagcttgccaacattgccagcaaaccaagtgaacggcacgtgttcattgtggacgactttgaatcttttgagaagatcgaagacaatcttattacatttgtttgtgaaactgccacttcaagttgtcctctcatttatttggatggctacacctcaccaggttttaaaatgcttgaagcatacaacctgacagaaaagaattttgcttctgtacaaggagtatctttggagtcagggtctttccccagctactcagcatacaggattcagaagaatgcgtttgtgaatcagcctacagcagacctacacccaaatggactccctccttcatacacgattatattattattcagacttctcccagaaactcccagtgacccttttgcaatttggcaaatcacagacagagactacaaaccacaagttggagtgattgcagatccttctagcaagacgttatcattctttaacaaggatacaagaggcgaggtgcaaactgttacatttgacacagaagaagtaaagacattattttatggaagttttcacaaggttcatattgtagtgacctcaaaaagtgttaagatttacattgactgctatgaaattatagaaaaagacatcaaggaagctggaaatataacaactgatggttatgaaattcttggaaaactccttaaaggggaaaggaaatcagccgcattccaaatccagagttttgacattgtctgcagtccagtgtggaccagtagagacagatgctgtgatattccctctaggagagatgagggaaaatgccctgcttttccaaattcttgcacatgtacacaggacagcgttggacctccaggacctccaggccctgcaggaggacctggtgctaaaggtcccagaggtgaaagaggtatcagtggggcaattgggccccctggtcctcgtggagacataggtcctccaggcccccagggtcctccaggccctcagggacccaatggactctctattccgggagagcaaggtcgccaagggatgaaaggtgatgctggagagccaggacttccaggccgaacaggaaccccaggattacctggcccaccaggaccaatgggacctccaggagacagaggcttcactggaaaagacagtgcaatgggacccaggggcccaccagggcggccgggaagcccaggctccccaggagtcacaggaccaagtgggaagccaggaaaacctggagatcatggcagaccaggtccatctgggttgaaaggagaaaaaggtgataggggagacattgcttcccagaacatgatgcgagcagttgcaagacaagtctgtgaacaattgataagtggtcagatgaacagattcaatcagatgctgaatcagattccaaatgattaccagtccagtcgcaaccagccaggcccgccgggtccaccgggacctcctggtagcgcaggagccagaggagaacctgggcctggggggcggccaggcttcccgggcacaccagggatgcagggaccccctggggaacgaggtttgccaggagagaaaggtgaaaggggtactggatcttcaggacctcgggggctgcctgggcccccaggtccacaaggagaatccagaacaggtccaccagggtccacaggttcaagaggtccccctggcccccctggccgtcctggaaactcaggtatccagggccccccaggtcctcctggatactgtgattcttctcagtgtgccagcatcccatacaacgggcaaagctatccaggttccggctaacacattttctaagtcgccagtgctgcttacagtttgaatacatgaaaatcctgtttctgagatgtttgcgcacgtgcttattaggaaatgagtctgtatggaaatctcaccacagataatggttaacgaaccgggtcgacatcacaaaggagggtggagactctttttactaacttgaatgagacaaaagcagtggtgtcagtttataatcctgatgcatttcagtaataatgtagaaaaacattattttaaaaaagttccaacacacagccatgaggagccatgaggagcctcagttttgaaagaggtgcataataaaactactaaccagaggagtctatgccattttaagaaaaacaattaacctggttaaagagaaatgtcttatgtaaataataaactaattgtggcttgtaaatgatttgtatgtgatcctgtcgactaaaatcacttaacaattctacaataagcttctgcatcaaagcctgccgcttgctctatgccggaataacaccaaatggaatctcctcatctcttgcttgttagcgatgtgtctgattcagggcatctgtctttttgttacttttttgtccgtgtcctctcatttgggttttgtaactgcaattttcaaaccaaagtttaaaatcaccttttcttcctgttttgctgtagtcactggtgttcctcacccaccagctgtaactcagtttgtgtgaggtacagccacagaagatgtcatgtactgtatattacctggtgatagttgcttttcaccccccgagttcagtttctaggagccaatgaaacttcccctcacctcctcatctttccaagttgttctttgaattgaggagtttgaaggcataaacagttacttggggatttgcgaaaatcctacttagttactgcgtttacagttctttggcccagtctctgacccttcccaagtatttgtgcaatgattgtgtttactgctggatttttgaaggtttttttttttaagaaagtgccatttcattatttgattatcaccaaattatctggaaataattgggacattgtaacttatctatttatagttatgagattaagactggagtgccatcaccgcgggtgatgatttagcttttgctgtgtgtgtgtgtgtgtgtgtgccttccaaatcatgccataattgtaatgttgaatcggacagagccttacgtgcccgagggcggggcctacctgcctgagcgcgagcccttcatcgtgccggtggagcccgagcggacagcggaatacgaggactacggcgcagacgagcctgcagaggagcctcctgagccccaccggcgctggcggcgcgccctgccccacggacccgggcagtgaaccagagatcacgcgccgcgccgcgaggcttgggggaggtgttgaaattctcatttacaggtcagatagagcagtgtacgtcttttctgaggtgtttcttccagcgttgctcatccaggagtaccctttctgattgtagagaaccttgtttctgcaggaagcctagctccaagcacgcagtctgtagacatttttgcctttgcccttgaaatgcttgcaaaatactttgttaacaaaagctgcaaagagagaacatgccgtgtgcctttagttagcacagcgggcagcctcagtgaaactcttaggttaagcagttaagtcctggaacccagagctgctgtgtatttcgagcgggcagtttatcttttgctatacttattttcaattcaattacaccacgattcaaataattcccctcctaaaaccaaaaaggagggaaacgtcaactccattgcaattacttatcttcctcttctatctctgttatacgccggggcatagaatgctcgtatacatctctttaacaaccacaaaccttaagccatgtagatgaagttagtgcatcaacgggatacagttccatattgccttaaacctccttgttttagacacactaacatttataccaaattgcagattattctgcagagagggaattgcatgtttgtgttgtatatttagtatgaacttttttcagaatataatatttcttagttatcaaaagtagttggaaaacatttgcaagactatgaacatagaattgctgcttttatattttaactgcagattgtgaatttcactgccttatattatttatttctgaaacaaaagaggcatttttcaataaaactactgaaaatttgaaaaaaaaaaaaaaa

SEQ ID NO: 478 - DNA, 1640 bp, Homo sapiens; identical to SEQ ID NO: 419

SEQ ID NO: 479 - DNA, 3333 bp, Homo sapiens
acgcgtccgagctggctcagggcgtccgctaggctcggacgacctgctgagcctcccaaaccgcttccataaggctttgcctttccaacttcagctacagtgttagctaagtttggaaagaaggaaaaaagaaaatccctgggccccttttcttttgttctttgccaaagtcgtcgttgtagtctttttgcccaaggctgttgtgtttttagaggtgctatctccagttccttgcactcctgttaacaagcacctcagcgagagcagcagcagcgatagcagccgcagaagagccagcggggtcgcctagtgtcatgaccagggcgggagatcacaaccgccagagaggatgctgtggatccttggccgactacctgacctctgcaaaattccttctctaccttggtcattctctctctacttggggagatcggatgtggcactttgcggtgtctgtgtttctggtagagctctatggaaacagcctccttttgacagcagtctacgggctggtggtggcagggtctgttctggtcctgggagccatcatcggtgactgggtggacaagaatgctagacttaaagtggcccagacctcgctggtggtacagaatgtttcagtcatcctgtgtggaatcatcctgatgatggttttcttacataaacatgagcttctgaccatgtaccatggatgggttctcacttcctgctatatcctgatcatcactattgcaaatattgcaaatttggccagtactgctactgcaatcacaatccaaagggattggattgttgttgttgcaggagaagacagaagcaaactagcaaatatgaatgccacaatacgaaggattgaccagttaaccaacatcttagcccccatggctgttggccagattatgacatttggctccccagtcatcggctgtggctttatttcgggatggaacttggtatccatgtgcgtggagtacgtcctgctctggaaggtttaccagaaaaccccagctctagctgtgaaagctggtcttaaagaagaggaaactgaattgaaacagctgaatttacacaaagatactgagccaaaacccctggagggaactcatctaatgggtgtgaaagactctaacatccatgagcttgaacatgagcaagagcctacttgtgcctcccagatggctgagcccttccgtaccttccgagatggatgggtctcctactacaaccagcctgtgtttctggctggcatgggtcttgctttcctttatatgactgtcctgggctttgactgcatcaccacagggtacgcctacactcagggactgagtggttccatcctcagtattttgatgggagcatcagctataactggaataatgggaactgtagcttttacttggctacgtcgaaaatgtggtttggttcggacaggtctgatctcaggattggcacagctttcctgtttgatcttgtgtgtgatctctgtattcatgcctggaagccccctggacttgtccgtttctccttttgaagatatccgatcaaggttcattcaaggagagtcaattacacctaccaagatacctgaaattacaactgaaatatacatgtctaatgggtctaattctgctaatattgtcccggagacaagtcctgaatctgtgcccataatctctgtcagtctgctgtttgcaggcgtcattgctgctagaatcggtctttggtcctttgatttaactgtgacacagttgctgcaagaaaatgtaattgaatctgaaagaggcattataaatggtgtacagaactccatgaactatcttcttgatcttctgcatttcatcatggtcatcctggctccaaatcctgaagcttttggcttgctcgtattgatttcagtctcctttgtggcaatgggccacattatgtatttccgatttgcccaaaatactctgggaaacaagctctttgcttgcggtcctgatgcaaaagaagttaggaaggaaaatcaagcaaatacatctgttgtttgagacagtttaactgttgctatcctgttactagattatatagagcacatgtgcttattttgtactgcagaattccaataaatggctgggtgttttgctctgtttttaccacagctgtgccttgagaactaaaagctgtttaggaaacctaagtcagcagaaattaactgattaatttcccttatgttgaggcatggaaaaaaaattggaaaagaaaaactcagtttaaatacggagactataatgataacactgaattcccctatttctcatgagtagatacaatcttacgtaaaagagtggttagtcacgtgaattcagttatcatttgacagattcttatctgtactagaattcagatatgtcagttttctgcaaaactcactcttgttcaagactagctaatttatttttttgcatcttagttatttttaaaaacaaattcttcaagtatgaagactaaattttgataactaatattatccttattgatcctattgatcttaaggtatttacatgtatgtggaaaaacaaaacacttaactagaattctctaataaggtttatggtttagcttaaagagcacctttgtatttttattatcagatggggcaacatattgtatgaagcatatgtagcacttcacagcatggttatcatgtaagctgcaggtagaagcaaagctgtaaagtagatttatcacacaatgactgcatacagacttcaaatatgtcaatagtttggtcatagaacctagaagccaaaagccacacagaagggcaagaatcccaatttaactcatgttatcatcattagtgatctgtgttgtagaacatgagggtgtaagccttcagcctggcaagttacatgtagaaagcccacacttgtgaaggttttgttttacaaatcacttgatttaacacactcaggtagaatatttttatttttactgttttatacccagaagttatttctacattgttctacagcaagaatattcataaaagtatccctttcaaatgcctttgagaagaatagaagaaaaaaagtttgtatatattttaaaaaattgttttaaaagtcagtttgcaacatgtctgtaccaagatggtactttgccttaaccgtttatatgcactttcatggagactgcaatacgttgctatgagcactttctttatccttggagtttaatcctttgcttcatctttctacagtatgacataatgatttgctatgttgtaaaatctttgtaaaaaatttctatataaaaatattttgaaaatcttaaaaaaaaaaaaaaaaa

SEQ ID NO: 480 - DNA, 3769 bp, Homo sapiens
ggcggcggaggcagcagtcttagaatgagtagcaatatccacgcgaaccatctcagcctagacgcgtcctcctcctcctcctcctcctcttcctcttcttcttcttcctcctcctcttcctcctcgtcctcggtccacgagcccaagatggatgcgctcatcatcccggtgaccatggaggtgccgtgcgacagccggggccaacgcatgtggtgggctttcctggcctcctccatggtgactttcttcgggggcctcttcatcatcttgctctggcggacgctcaagtacctgtggaccgtgtgctgccactgcgggggcaagacgaaggaggcccagaagattaacaatggctcaagccaggcggatggcactctcaaaccagtggatgaaaaagaggaggcagtggccgccgaggtcggctggatgacctccgtgaaggactgggcgggggtgatgatatccgcccagacactgactggcagagtcctggttgtcttagtctttgctctcagcatcggtgcacttgtaatatacttcatagattcatcaaacccaatagaatcctgccagaatttctacaaagatttcacattacagatcgacatggctttcaacgtgttcttccttctctacttcggcttgcggtttattgcagccaacgataaattgtggttctggctggaagtgaactctgtagtggatttcttcacggtgccccccgtgtttgtgtctgtgtacttaaacagaagttggcttggtttgagatttttaagagctctgagactgatacagttttcagaaattttgcagtttctgaatattcttaaaacaagtaattccatcaagctggtgaatctgctctccatatttatcagcacgtggctgactgcagccgggttcatccatttggtggagaattcaggggacccatgggaaaatttccaaaacaaccaggctctcacctactgggaatgtgtctatttactcatggtcacaatgtccaccgttggttatggggatgtttatgcaaaaaccacacttgggcgcctcttcatggtcttcttcatcctcgggggactggccatgtttgccagctacgtccctgaaatcatagagttaataggaaaccgcaagaaatacgggggctcctatagtgcggttagtggaagaaagcacattgtggtctgcggacacatcactctggagagtgtttccaacttcctgaaggactttctgcacaaggaccgggatgacgtcaatgtggagatcgtttttcttcacaacatctcccccaacctggagcttgaagctctgttcaaacgacattttactcaggtggaattttatcagggttccgtcctcaatccacatgatcttgcaagagtcaagatagagtcagcagatgcatgcctgatccttgccaacaagtactgcgctgacccggatgcggaggatgcctcgaatatcatgagagtaatctccataaagaactaccatccgaagataagaatcatcactcaaatgctgcagtatcacaacaaggcccatctgctaaacatcccgagctggaattggaaagaaggtgatgacgcaatctgcctcgcagagttgaagttgggcttcatagcccagagctgcctggctcaaggcctctccaccatgcttgccaacctcttctccatgaggtcattcataaagattgaggaagacacatggcagaaatactacttggaaggagtctcaaatgaaatgtacacagaatatctctccagtgccttcgtgggtctgtccttccctactgtttgtgagctgtgttttgtgaagctcaagctcctaatgatagccattgagtacaagtctgccaaccgagagagccgtatattaattaatcctggaaaccatcttaagatccaagaaggtactttaggatttttcatcgcaagtgatgccaaagaagttaaaagggcatttttttactgcaaggcctgtcatgatgacatcacagatcccaaaagaataaaaaaatgtggctgcaaacggcttgaagatgagcagccgtcaacactatcaccaaaaaaaaagcaacggaatggaggcatgcggaactcacccaacacctcgcctaagctgatgaggcatgaccccttgttaattcctggcaatgatcagattgacaacatggactcccatgtgaagaagtacgactctactgggatgtttcactggtgtgcacccaaggagatagagaaagtcatcctgactcgaagtgaagctgccatgaccgtcctgagtggccatgtcgtggtctgcatctttggcgacgtcagctcagccctgatcggcctccggaacctggtgatgccgctccgtgccagcaactttcattaccatgagctcaagcacattgtgtttgtgggctctattgagtacctcaagcgggaatgggagacgcttcataacttccccaaagtgtccatattgcctggtacgccattaagtcgggctgatttaagggctgtcaacatcaacctctgtgacatgtgcgttatcctgtcagccaatcagaataatattgatgatacttcgctgcaggacaaggaatgcatcttggcgtcactcaacatcaaatctatgcagtttgatgacagcatcggagtcttgcaggctaattcccaagggttcacacctccaggaatggatagatcctctccagataacagcccagtgcacgggatgttacgtcaaccatccatcacaactggggtcaacatccccatcatcactgaactagtgaacgatactaatgttcagtttttggaccaagacgatgatgatgaccctgatacagaactgtacctcacgcagccctttgcctgtgggacagcatttgccgtcagtgtcctggactcactcatgagcgcgacgtacttcaatgacaatatcctcaccctgatacggaccctggtgaccggaggagccacgccggagctggaggctctgattgctgaggaaaacgcccttagaggtggctacagcaccccgcagacactggccaatagggaccgctgccgcgtggcccagttagctctgctcgatgggccatttgcggacttaggggatggtggttgttatggtgatctgttctgcaaagctctgaaaacatataatatgctttgttttggaatttaccggctgagagatgctcacctcagcacccccagtcagtgcacaaagaggtatgtcatcaccaacccgccctatgagtttgagctcgtgccgacggacctgatcttctgcttaatgcagtttgaccacaatgccggccagtcccgggccagcctgtcccattcctcccactcgtcgcagtcctccagcaagaagagctcctctgttcactccatcccatccacagcaaaccgacagaaccggcccaagtccagggagtcccgggacaaacagaagtacgtgcaggaagagcggctttgatatgtgtatccaccgccactgtgtgaaactgtatctgccactcatttccccagttggtgtttccaacaaagtaactttccctgttttcccctgtagtccccccctttttttttacacatatttgcatatgtatgatagtgtgcatgtggttgtcatttttatttcaccaccataaaacccttgagcacaacagcaaataagcaggacgggcccaaagttatttatgattctggggggaaaataacccaaaggcatgctccagacataaatagctcactgc

SEQ ID NO: 481 - DNA, 2280 bp, Homo sapiens
cgggccaggtttccaggctcggccgccgcctccatcccagcacctgcggagggagcgctgaccatggctccctggcctgaattgggagatgcccagcccaaccccgataagtacctcgaaggggccgcaggtcagcagcccactgcccctgataaaagcaaagagaccaacaaaacagataacactgaggcacctgtaaccaagattgaacttctgccgtcctactccacggctacactgatagatgagcccactgaggtggatgacccctggaacctacccactcttcaggactcggggatcaagtggtcagagagagacaccaaagggaagattctctgtttcttccaagggattgggagattgattttacttctcggatttctctactttttcgtgtgctccctggatattcttagtagcgccttccagctggttggaggaaaaatggcaggacagttcttcagcaacagctctattatgtccaaccctttgttggggctggtgatcggggtgctggtgaccgtcttggtgcagagctccagcacctcaacgtccatcgttgtcagcatggtgtcctcttcattgctcactgttcgggctgccatccccattatcatgggggccaacattggaacgtcaatcaccaacactattgttgcgctcatgcaggtgggagatcggagtgagttcagaagagcttttgcaggagccactgtccatgacttcttcaactggctgtccgtgttggtgctcttgcccgtggaggtggccacccattacctcgagatcataacccagcttatagtggagagcttccacttcaagaatggagaagatgccccagatcttctgaaagtcatcactaagcccttcacaaagctcattgtccagctggataaaaaagttatcagccaaattgcaatgaacgatgaaaaagcgaaaaacaagagtcttgtcaagatttggtgcaaaacttttaccaacaagacccagattaacgtcactgttccctcgactgctaactgcacctccccttccctctgttggacggatggcatccaaaactggaccatgaagaatgtgacctacaaggagaacatcgccaaatgccagcatatctttgtgaatttccacctcccggatcttgctgtgggcaccatcttgctcatactctccctgctggtcctctgtggttgcctgatcatgattgtcaagatcctgggctctgtgctcaaggggcaggtcgccactgtcatcaagaagaccatcaacactgatttcccctttccctttgcatggttgactggctacctggccatcctcgtcggggcaggcatgaccttcatcgtacagagcagctctgtgttcacgtcggccttgacccccctgattggaatcggcgtgataaccattgagagggcttatccactcacgctgggctccaacatcggcaccaccaccaccgccatcctggccgccttagccagccctggcaatgcattgaggagttcactccagatcgccctgtgccactttttcttcaacatctccggcatcttgctgtggtacccgatcccgttcactcgcctgcccatccgcatggccaaggggctgggcaacatctctgccaagtatcgctggttcgccgtcttctacctgatcatcttcttcttcctgatcccgctgacggtgtttggcctctcgctggccggctggcgggtgctggttggtgtcggggttcccgtcgtcttcatcatcatcctggtactgtgcctccgactcctgcagtctcgctgcccacgcgtcctgccgaagaaactccagaactggaacttcctgccgctgtggatgcgctcgctgaagccctgggatgccgtcgtctccaagttcaccggctgcttccagatgcgctgctgctactgctgccgcgtgtgctgccgcgcgtgctgcttgctgtgtggctgccccaagtgctgccgctgcagcaagtgctgcgaggacttggaggaggcgcaggaggggcaggatgtccctgtcaaggctcctgagacctttgataacataaccattagcagagaggctcagggtgaggtccctgcctcggactcaaagaccgaatgcacggccttgtaggggacgccccagattgtcagggatggggggatggtccttgagttttgcatgctctcctccctcccacttctgcaccctttcaccacctcgaggagatttgctccccattagcgaatgaaattgatgcagtcctaaaaaaaaaaa

SEQ ID NO: 482 - DNA, 2793 bp, Homo sapiens
tcgtaaggttcataggtaagagaacagcgaaggttccggggctagtttgtgtttcagacttccatatttccatttgcagttgggtgaagtggttagagctgaaaggggacagctggagtcaaacaacttaactcaaatatctgggaacgatttcgcgctgaggaagaccctttgggacttgtagctccactccggggaacggactcgccgggactgacagttgccggaagtgaggctgcggggaatggccgccgctgcgaccatggcggctgcggcccgggaactggtgttgcgggctgggacctcagatatggaggaggaagagggcccgctggcgggtggtcctgggctccaggaaccactgcaacttggggagttggatatcacttctgatgaattcatcctggatgaagtggatgttcacattcaggcaaatctggaggatgagttagtaaaggaagctcttaaaacgggtgtagatctccgtcactattcaaagcaagttgagctggagctacagcagattgaacagaaatccattcgggattatattcaagagagtgagaatatagcatctctacacaaccagatcacagcctgtgatgctgtcctggagcgaatggagcagatgttgggagcttttcagagtgacctcagctccatcagctctgagatccggacactgcaggaacagtcaggagccatgaacattcgacttcgaaatcgccaggcagttcgggggaaacttggggagcttgttgatggtctggtggtgccttctgctctggtcacggcaattctggaggctccagtgacagagcccaggttcttggagcagctacaggagctggatgccaaggcagccgcagtcagagagcaggaagctagaggcacagcagcctgcgcagatgtcagaggcgtgctcgatcggctccgggtcaaggcagtgacgaagatccgagagtttatcctccagaagatttattccttcaggaaacccatgaccaactatcagatcccccagacggccctgctgaagtacaggttcttctatcagtttctgctgggcaatgaacgagcaacagcaaaggagatcagggatgaatatgtggagacgctgagcaagatttacctgtcttactaccgctcttacctggggcggctcatgaaggtgcagtatccatttgaggccctcttccgcagccagcactacgccctcctagacaattcctgccgcgaataccttttcatctgtgaattttttgttgtgtctggcccagctgcacacgacctgttccatgctgtcatgggccgtacactcagcatgaccctgaaacacctggattcttatctagctgactgctacgatgccattgctgtttttctctgtatccacattgttctccggttccgtaacattgcagcaaagagggatgttcctgccctggacaggtactgggaacaggtgcttgccttgctatggccacggtttgaactgatcctggagatgaatgttcagagcgtccgaagcactgacccccagcgcctaggggggttggatactcggccccactatatcacacgccgctatgcagagttctcctccgctcttgtcagtatcaaccagacaattcctaatgaacggaccatgcaattgctgggacagctgcaggtggaggtggagaattttgtcctccgagtggcagctgagttctcctcaaggaaggagcagcttgtgtttctgatcaacaactatgacatgatgctgggtgtgctgatggagcgggctgcagatgacagcaaagaggttgagagcttccagcagctgctcaatgctcggacacaggaattcattgaagagttgctgtctcccccttttgggggtttagtggcatttgtgaaggaggctgaggctttgattgagcgtggacaggctgagcgacttcgaggggaagaagcccgggtaactcagctgatccgtggctttggtagttcctggaaatcatcagtggaatctctgagtcaggatgtaatgcggagtttcaccaacttcagaaatggcaccagtatcattcagggagcgctgacccagctgatccagctctatcatcgcttccaccgggtgctgtcccagccgcagctccgagccctccctgcccgggctgagctcatcaacattcaccaccttatggtggagctcaagaagcataagcccaacttctgatgtgccagaaaccgccctgagatctgccggtcatctccatggacttctgcaccccattccatacccttcttcacctggggtaccccttccagttttccccttgcttcccaggcccttgacatggcttacctgccttcactcccagcaccttgcccaacaggataagctggatccccttggccttctgaatatcccagtgtcttcaggtttcccaagaccacttccctgtgggcttccaaaatggcctttatcatttctccagtctgtcaccctcctttcctgctcccatacacccaaggcttgtttcttcccctgtaaaaaccactgcctcaatctctggttcactcaactagtcaccatgtcctgaggcatgaagcctcctcagctcttggaattgctggcaaggggtgactgcctctgagtcattgtgtttttcaaagtgatttcttttctgtagctttttgacctaagatctcagcaatttgaacactaacctctcccctcctggctcaagaattactccgaagtcagtctgcagaaaataaatatttagtatgacatgacactta

SEQ ID NO: 483 - DNA, 2985 bp, Homo sapiens
tcgtaaggttcataggtaagagaacagcgaaggttccggggctagtttgtgtttcagacttccatatttccatttgcagttgggtgaagtggttagagctgaaaggggacagctggagtcaaacaacttaactcaaatatctgggaacgatttcgcgctgaggaagaccctttgggacttgtagctccactccggggaacggactcgccgggactgacagttgccggaagtgaggctgcggggaatggccgccgctgcgaccatggcggctgcggcccgggaactggtgttgcgggctgggacctcagatatggaggaggaagagggcccgctggcgggtggtcctgggctccaggaaccactgcaacttggggagttggatatcacttctgatgaattcatcctggatgaagtggatgttcacattcaggcaaatctggaggatgagttagtaaaggaagctcttaaaacgggtgtagatctccgtcactattcaaagcaagttgagctggagctacagcagattgaacagaaatccattcgggattatattcaagagagtgagaatatagcatctctacacaaccagatcacagcctgtgatgctgtcctggagcgaatggagcagatgttgggagcttttcagagtgacctcagctccatcagctctgagatccggacactgcaggaacagtcaggagccatgaacattcgacttcgaaatcgccaggcagttcgggggaaacttggggagcttgttgatggtctggtggtgccttctgctctggtcacggcaattctggaggctccagtgacagagcccaggttcttggagcagctacaggagctggatgccaaggcagccgcagtcagagagcaggaagctagaggcacagcagcctgcgcagatgtcagaggcgtgctcgatcggctccgggtcaaggcagtgacgaagatccgagagtttatcctccagaagatttattccttcaggaaacccatgaccaactatcagatcccccagacggccctgctgaagtacaggttcttctatcagtttctgctgggcaatgaacgagcaacagcaaaggagatcagggatgaatatgtggagacgctgagcaagatttacctgtcttactaccgctcttacctggggcggctcatgaaggtgcagtatgaggaagtcgctgagaaagatgatctaatgggtgtggaagatacagcaaagaaaggattcttctcaaagccatcgctccgcagcaggaacaccattttcaccctaggaacccgcggctctgtcatctcccccactgaacttgaggcccccatcctggtgcctcacacagcgcagcgcggagagcagaggtatccatttgaggccctcttccgcagccagcactacgccctcctagacaattcctgccgcgaataccttttcatctgtgaattttttgttgtgtctggcccagctgcacacgacctgttccatgctgtcatgggccgtacactcagcatgaccctgaaacacctggattcttatctagctgactgctacgatgccattgctgtttttctctgtatccacattgttctccggttccgtaacattgcagcaaagagggatgttcctgccctggacaggtactgggaacaggtgcttgccttgctatggccacggtttgaactgatcctggagatgaatgttcagagcgtccgaagcactgacccccagcgcctaggggggttggatactcggccccactatatcacacgccgctatgcagagttctcctccgctcttgtcagtatcaaccagacaattcctaatgaacggaccatgcaattgctgggacagctgcaggtggaggtggagaattttgtcctccgagtggcagctgagttctcctcaaggaaggagcagcttgtgtttctgatcaacaactatgacatgatgctgggtgtgctgatggagcgggctgcagatgacagcaaagaggttgagagcttccagcagctgctcaatgctcggacacaggaattcattgaagagttgctgtctcccccttttgggggtttagtggcatttgtgaaggaggctgaggctttgattgagcgtggacaggctgagcgacttcgaggggaagaagcccgggtaactcagctgatccgtggctttggtagttcctggaaatcatcagtggaatctctgagtcaggatgtaatgcggagtttcaccaacttcagaaatggcaccagtatcattcagggagcgctgacccagctgatccagctctatcatcgcttccaccgggtgctgtcccagccgcagctccgagccctccctgcccgggctgagctcatcaacattcaccaccttatggtggagctcaagaagcataagcccaacttctgatgtgccagaaaccgccctgagatctgccggtcatctccatggacttctgcaccccattccatacccttcttcacctggggtaccccttccagttttccccttgcttcccaggcccttgacatggcttacctgccttcactcccagcaccttgcccaacaggataagctggatccccttggccttctgaatatcccagtgtcttcaggtttcccaagaccacttccctgtgggcttccaaaatggcctttatcatttctccagtctgtcaccctcctttcctgctcccatacacccaaggcttgtttcttcccctgtaaaaaccactgcctcaatctctggttcactcaactagtcaccatgtcctgaggcatgaagcctcctcagctcttggaattgctggcaaggggtgactgcctctgagtcattgtgtttttcaaagtgatttcttttctgtagctttttgacctaagatctcagcaatttgaacactaacctctcccctcctggctcaagaattactccgaagtcagtctgcagaaaataaatatttagtatgacatgacactta

SEQ ID NO: 484 - DNA, 551 bp, Homo sapiens
  misc_feature (477)..(477): "n" = a, t, g, or c.
  misc_feature (541)..(541): "n" = a, t, g, or c.
tttttttttttttttttttaaatgaattagtttattgaacttggagatggacacccttataagggcaataacaaacaaaaatagaaataggtttaagttataacacacaagaataaaattagatgtaaagacgactttcctcagttttaaggtggataagtgggttgttaaattataacagatttctctaggagggtctggtgtactccaggctcgctgggaggcagacctggataatctctgagtatatctgtccccacctggcattgttgagacccttcagagtacttctttaggtccatgattgaaaattaagaggcagccagtgcctccattgttataagggccataaggtttggttatctttgataaagagaaatggaaacatataacagagctcttcctcaagtcctgcattgggaacattagcacacaccaggacctttcctatatgtagacacagtgcagatttgatcngtggtgcagccaaactaaaacacagggtcatggcattggttccccacttttggtacaaacaagnccttaatcca

SEQ ID NO: 485 - DNA, 742 bp, Homo sapiens
aatgataacagaagcctcattgggagttaccactgtacaaatcaatgcctggaggccctgaactagcattagacattcacagggaagtcagctgaggttaaggaaacatccacgcagcatctctgaggatacagaagtgggaggaggaaggtgacagccgcaatgcacacgctgtgtatctgtagcttggactcttcttcaggcagttcttgttttccttccacattggatggtaggggctgggggaggtttgcaaatgatcatgtggaagagaggccttgtgtatcagcctcgcagaagagccaatactgtagacagatatcacccagatgctccatgggccatgcccatgaagcgatgtgacattggtcctctgaacaatggttcagggagctcgtacaacagaagaacagtgggtccttcacaatctagggtctggcacaacttcctgaaggcatgctaggaaataggtttatcaacaaaacttggctgtccccaagggtaaaagtcattctcctagtttttactgcatgtatctaggtttcaaattaaagaacgagaagaaaggccgcaactgaaaagttatctggaatactgtggcactttaccaatctgttttgcttataatatatggcagagccaacgaaaccctgttgatataaactttcattataataatcctgtactgtacactctcagaatacagaaagaatccatcctatcatacatgtttcatctttaa

SEQ ID NO: 486 - DNA, 580 bp, Homo sapiens
aacagtatttctttagactttattaaaaaatgacataaagtgcatcttattaaaaaatgtataaaaaccacataaattcagggcccctgtgctgggcagtgttgatatcccttagagtggaggaaggtgagggatggagggtgaactggggactggggagaggaccagggtgcagttagttcctcgtgtttgagttcaaagatggagcgagggtggatatggtgggaaggggcacacggtttctcacgcaacaacggaggaaggcaggcgacagtctcttccctgaattctgagggaaaggcgtacattgtcacgaaatctctcctgagctcgcgctgtcctctcgtgtggccacagcctgatacaggctggaaaggtccaggagttgggtccgagcccaggacctggtgagggccgcagtgccaacctagccctctggtccctgaggtggtgggacgacggcagcaacaactacatcctcggctgactggcaaggcagaacgcacgcagcccaagctggtcctgaatctgcagtgagacagggcagccggtggcagcgggataatgtggaaggtgaaga

SEQ ID NO: 487 - DNA, 528 bp, Homo sapiens
  misc_feature (516)..(516): "n" = a, t, g, or c.
  misc_feature (521)..(521): "n" = a, t, g, or c.
  misc_feature (527)..(527): "n" = a, t, g, or c.
gccttttaggtggaccgctctgtatgactctcatgcttcaaaactattttttattcaagtgacttacaatggccctaggaaacaagttctgttattatcccccattttaaaatgatgaaaatggacaaagcaaaagcaagcaacttaaccaataccccatggcctcacagcctttagaatagtcatattatataaatatggcaataacaatgcactgaaaatgtctccaaaacaaactctacattttaaaaaatgtataacaggaatctaaggaaggggtcttacttctctgattcagggagtgcgaaatcccttaaactcatatcagacctgtgatgaacaaactcacactaagttttaaaaactgcttaatttactttatcatgactagtaatatataagagttttgtatatactttattaaaaataactttggaaaactatttttgcctgatcagcaataaaactactgataaggataagctgggttatcaaatattccctagtggttaatcngggcnaataant

SEQ ID NO: 488 - DNA, 463 bp, Homo sapiens
ttttttagagattagtatttccttgttcacaagacacctaattgacttgcaacaagacaaaatattcagtgcatctggttggggccaacatggatgatgacgtgtttctcataagcccttttcattgttttctcaatttgcttcagaaaaacttgcgggattcgtccacataaagtgtgcacagtctccaaaaacttcagctgaagggggtaatacatggattgaaagagattgtcttgaaagggaaaatcccgtattgcttcatagagtgctctgaacgttggttgcttatcgtcatggtagacgcctcggtttccatgcagaacagacacaccttcatgctcagcctctctgcagttgcttccgtacatgcagtgatcgggacggtagttccactggcaggggaatacatagagacactctgggttgaaataaaaaataatatttaataaatcctggtctc

SEQ ID NO: 489 - DNA, 470 bp, Homo sapiens
cagatcttttaaaattttattttataggtagcttcgataaaagcttcagatagacccacatactatacagagtttgtgaaatctacactttcaaatcataatattctctattttaggctattatatttagaagcatgacatctcaaatccttttattacaagtagttcttgcacataaatgttatatcacaatagcaaaaaaatgtaaacttcttttgcaaactacataaatactataatatctaccttgaagttattctcattttaaatcagaatacactctaaatgttttacatagaaaactctcgttggtagcctgtgtgtatgaaacatcattttttctttcttaactacttgtctttcatgttgcctacttaggtctctgaaggagaaaaattcaaaatagaacccagatcaaaaatcagttcacatgtaaggcaggtaccagaaggatgccattaaccttggga

SEQ ID NO: 490 - DNA, 530 bp, Homo sapiens
ttttttttttttttttaaaaggcaaagaaggtttttatttaagggacaacatttgagagctaaaaaccagctcacatcaaaatcaagacccagttgtaaaaatcttttaactccataatgctgtttttgtcttgttagaaatctgatatcttacattagcgtttctaacggattttgtacaaggcagccataaggaatataataaacctttttcaccacagaaccatctgtcacagataatactgaaagttacacacttaggaacagtcagaccacagacaaggtcagactggctgccaccaccaagtaaacaactagaaaaggacagcggggtccaagggtgggggtccctgtgcacgagtcgccctcctctggcctgccccccctcgggtcacctgcttctcctttgccccaaagagggtggagtcaaatgcagattttcctcccaactgcctgttagtgtctcaacaaggagagcagagcccaggtcaggcctcactgcttggacttaaccctaactatgattttta

SEQ ID NO: 491 - DNA, 343 bp, Homo sapiens
tttttttttttttttattttatatatgatgcttcttttaatgcagccaaaagtgatatttgcttttctcaaaaccataatcgatacaagatgcagtgaccaattcattccttaaaacacctgggctccttaagcggctagaaaacacaagttacatccagcccatcagggagccagaggcgggaggggtccccagccaagctctggcaggcctgccatggggcagggcctgaccgtgcagccaaaggctggcaaaggcctggggaagggggggcaaaagccacttgggcttttaattcctgaaaccggagaccaagggctgctcatcaagctccgtcaggcaa

SEQ ID NO: 492 - DNA, 503 bp, Homo sapiens
atctgccttctcaccatgaggcttctagtcctttccagcctgctctgtatcctgcttctctgcttctccatcttctccacagaggggaagaggcgtcctgccaaggcctggtcaggcaggagaaccaggctctgctgccaccgagtccctagccccaactcaacaaacctgaaaggacatcatgtgaggctctgtaaaccatgcaagcttgagccagagccccgcctttgggtggtgcctggggagtcccacaggtgtagcactcccaaagcaagactccagacagcggagaacctcatgcctggcacctgaggtacccagcagcctcctgtctcccctttcagccttcacagcagtgagctgcaatgttggagggcttcatctcgggctgcaaggaccctgggaaagttccagaactccacgtccttgtctcaattgtgccatcaactttcagagctatcatgagccaacctcaccccacagggcctcagtcgccaccatgt

SEQ ID NO: 493 - DNA, 401 bp, Homo sapiens
tttaagtctgaagacattttatttttcctatgtgggaagcaatgatgatcttacactttttgttttctgtttttaagaagggcagcacaaggatatgtgcagattttcttttaagtaccttgctaagcgacactagactaataaccattttctagaattaggtgacctacttctgaataaaattgaaactggattgcgtattcccttactaataataatactaaatatattcttaaatcagttttcaaaattcaagatgaaatctagaaatatggaacaactagcaggaataagcccgaagatgattctagctccgttactactaaaacctagtttctaaactttcgaggattttatatgaactcgcatgaaaaaatgagctcagaggctagaatatgact

SEQ ID NO: 494 - DNA, 560 bp, Homo sapiens
ttttttgtctgtattgaaactttattacaaaattataaagcagagctctgtaacaaaataatacacatttgggtttgctttaacctccaagtaagtctgagaaaatcttaataaaagccacttgaagtaacaattcacatccaagagatttccacaaatttatacaatgtatattgagcactagttcctgtacagcttattcttattagtttggatccaactattccaatgtattatgaaccagtcagctatctgtcttttgaaacaagtcttaactgaaatctcagagtaatcagcaaaagctacggaataattctaagaattagatgtttccatatcattaaaaccaaggatccatgaggggcagaagggaggattcaaagatttaaaaaaaatcaaattttagaccttggttaaatattaactggaatgggatcttggaactcccaactttaatttggtgtaataaaaatgatgcaaaaaaaaaaaaaatcagggttgtttgacaccttttttcctaaagggaaaccttcaccaaaaggggataaaagatttaaagg

SEQ ID NO: 495 - DNA, 508 bp, Homo sapiens
gcagacctcgtaggccctcttctctccccaccccaggttttatgccgtgtgcttttacctgctgatgctggtcatggtggaaggctttggggggaaggaggcagtgctgaggacgctgagggacaccccgatgatggtccacacaggcccctgctgctgctgctgcccctgctgtccacggctgctgctcaccagatttctgaggggagcacagctctatggatcaacactttcctcggcgtgtccacactgctggctctctggaccctgggcatcatttcccgtcaagccaggctacacctgggtgagcagaacatgggagccaaatttgctctgttccaggttctcctcatcctgactgccctacagccctccatcttctcagtcttggccaacggtgggcagattgcttgttcgcctccctattcctctaaaacccaggtctcaagtgatgaattgcacctcctcatactggagacttttctaatgactgtgctgacacgaatgt

SEQ ID NO: 496 - DNA, 461 bp, Homo sapiens
aaaaaataaaaatcatttatttaaacaaaaatatacacacagtgtacaatgaatatggtttacacagaacaataaaacaaaaatgatatctcttaaatgccaacataaaatgatctatttatgcctagaaaaaatttctaggaatacacattattgattcatctaaaatacatatataacataaaaagaaaacaaatgccaacctttcagatgagtaccacaaaaacctaaaagttaaatgttagattaaataaaattataaaatatccacacgagaagtatgtgtatacaaagtattgtatgtatgcagtgaaatgagagtgcccatacagttatatgcaaacttttgaaagtttcatagttgtttaacaaaatatttttaatgttgatagtgacataaaaacatcacaagaattatctagataatatagcaatattgccaaaatttgagtcaatgttac

SEQ ID NO: 497 - DNA, 895 bp, Homo sapiens
gcggccgcgtcgaccggcgcggctggagcgcagcgccgaagggactggcagggctgaagtgtgcgggacagcaagcccccgaatagccccggctgccacctcgcaggacccaaggccacgcgcgccgggcccagctgagccgcctcatgaagccgcccgcggaggacctgtcggacgcgctgtgcgagtttgacgcggtgctggccgacttcgcgtcgcccttccacgagcgccacttccactacgaggagcacctggagcgcatgaagcggcgcagcagcgccagtgtcagcgacagcagcggcttcagcgactcggagagtgcagattcactttataggaacagcttcagcttcagtgatgaaaaactgaattctccaacagactctaccccagctcttctctctgccactgtcactcctcagaaagctaaattaggagacacaaaagagctagaagccttcattgctgatcttgacaaaactttagcaagtatgtgaaacaagaagttctgggtcctttcatcataagggagaagcttcagaaagttccgaggacctgctaaaatcagctactagaatctgctgccagaggggacaaagacgtgcactcaaccttctaccaggccactctcaggctcaccttaaaatcagcccttgatcccatttctgggcaatttagacagtgaaactgactttgtttacctgcttgcagcatattagaacagacgatccatgctaatattgtattttctcttaaaacatagctttcctgtaatttaaagtgcttttatgaaaatatttgtaattaattatatatagttggaaatagcagtaagctttcccattataatatatttttgtatacaaataaaatttgaactgaacctcgtgcc

SEQ ID NO: 498 - DNA, 386 bp, Homo sapiens
atgaggctcctggcggccgcgctgctcctgctgctgctggcgctgtacaccgcgcgtgtggacgggtccaaatgcaagtgctcccggaagggacccaagatccgctacagcgacgtgaagaagctggaaatgaagccaaagtacccgcactgcgaggagaagatggttatcatcaccaccaagagcgtgtccaggtaccgaggtcaggagcactgcctgcaccccaagctgcagagcaccaagcgcttcatcaagtggtacaacgcctggaacgagaagcgcagggtctacgaagaatagggtgaaaaacctcagaagggaaaactccaaaccagttgggagacttgtgcaaaggactttgcagattaaaaaaaaaaaaaaaaaaa

SEQ ID NO: 499 - DNA, 4099 bp, Homo sapiens; identical to SEQ ID NO: 342

SEQ ID NO: 500 - DNA, 2653 bp, Homo sapiens
gaagttacaagagtagtagatgaacaactaaaggcgttgcttgagtccatggttgatgctgctgagaatctttgtcccaatgtgatgaaaaaagcccacattcgacaagacttgattcatgccagcaccgaaaagatttctattccacgtacctttgttaaaaatgtcctgttggagcagtctggaattgatatccttaacaaaattagtgaagtaaaattgacagtggcctcgttcctgtctgatagaattgtggatgaaatcctggatgcactctcacattgccatcataaactggctgaccatttcagcagacgtggcaagacccttcctcaacaagaatccttagagatcgagctggctgaggagaggccagttaaacgttccatcatcacagtggaggagctaacagagatagagcgtttggaagatctggatacctgtatgatgacccctaaatccaaaaggaagagtatccatagccgaatgctgcggcctgtttctagggcttttgaaatggagtttgatctagataaagcgctggaagaggtaccaattcacatcgaagacccgcccttcccatccctcagacaggagaagcggagctcgggatttatctctgagttgccctctgaagaggggaagaagctggaacactttaccaagttaaggccaaaaaggaataagaagcagcaacccacccaagcagcggtctgtgctgccaacatagtctcacaagatggtgaacagaatggtctcatggggagagtggatgaaggtgtagatgaattttttaccaagaaggtgaccaaaatggattccaagaaatggtcaacaagaggctcagagtcccatgagcttaatgaaggaggagatgaaaagaaaaagcgagattctcggaaaagtagtggctttctcaatttaatcaaatcccggtccaaatccgagcgaccaccaacgatcttgatgacagaagaaccctcctcaccaaaaggggcagtcagaagtccacctgtggactgtcccaggaaggacacaaaggccgccgagcacaatggcaattctgaacggatagaggagataaaaacacctgactcctttgaagagagtcaaggggaagaaatagggaaggtggaacggagtgacagcaagagcagcccacaggcagggcggaggtatggggtccaggtgatgggcagtggtctgctggcagagatgaaagccaagcaagagaaccgctttggtttgggaacaccagaaaagaataccaaagcagaacccaaagcggaagcaggctccaggtctcggagctcatccagcacacctacgagcccgaagcccctcctgcagtcccccaaacccagtctggcagcacggcccgtcatcccgcagaaaccaagaaccgcctcacggcctgatgacattccagactctccatctagcccgaaagttgcccttcttccacctgtcctgaaaaaagttccttcagacaaagagagagatggccagagtagcccccagcccagccccaggacattttcacaggaagtttcaaggagaagctggggccagcaggcccaggagtatcaagaacaaaagcaacggtcctccagtaaagatggccatcaaggcagcaaatctaatgactccggggaagaagcagaaaaagagtttatttttgtgtaaaggtcacccacgcagaagtcttcctgtgcagggtgctttggtagccatcagagaggaaccaagggcaacatcttttcttcccaggcgttcttctctgggtgctttattctcttctttttctttatttcgcccccacccccatcccctgccttttttttttttttttttttgtatagaaacagatccatttcttggtaatcaaagcacatttgtttggtcttcctccaaccctttgcatttgatttctaaacattccttcatatgcctttaatgaaagccagcaattatcccatgggccctacttgaatttatctgaggcagctacagattgccctgcaagatgagtttttggagataaatgaaataactggacacacactcacacaagtaacaccacagcagacctcggagtactgctaagtgtacctgtgtcaaatccgcacaggactcaatatagcaatttattcttgatgtatgcaattgcacattgtaattatattaacagagcacactaataatttgtatagattatatatattagatcttgggtatggtttttaccttctcccatggggaacttcttccttcctgatgtggaattgtacatttaaagcttggtcggtgacctttgcataccatcaacgagcacagctaagaacagagtgagagaggcccatggctgattttaccatgtgcccagattaatgtatatagttgattggaatgaggttttatgaatattcatgtttttgaaggcctttaatttctgtctgcatattagcttttaatgtgtgattttaagagagaatactttgacacctgtaaaaatcaaaatactactctttataagacatttcacaaatattcacttacattacaggctggaagtattttattcatatgtatatttataccaataaaatgattttacaagtggaaaaaaaaaaaaaaaaaaaaaaaaaaaaaa

SEQ ID NO: 501 - DNA, 2226 bp, Homo sapiens
ggcagcatggcgtctttccggcttctccaaacccttgcgaaaaactttattggcaaagctatcagagaacggacagtgtacccactgaggcggccaaagcttaactggatcagggcaggatgacatgaccttgtggtagatcccagaactgaggccccaggatgacagaacaggagaccctggccctactggaagtgaagaggtctgattccccagagaagagctcaccccaggccttggttcccaatggccggcagccagaaggggaaggtggggccgaatccccgggagctgagtccctcagagtggggtcttcagctggatctcccacagccatagagggggctgaggatggtctagacagcacagtaagtgaggctgccaccttgccctgggggactggccctcagcccagtgctccgttcccggatccccctggctggcgggacattgaaccagagccccctgagtcagaaccacttaccaagctagaggagctgcccgaagacgatgccaacctgctgcctgagaaagcggcccgtgccttcgtgcctattgacctacagtgcattgagcggcagccccaagaagaccttatcgtgcgctgtgaggcaggcgagggcgagtgccgaaccttcatgcccccccgggtcacccaccccgaccccactgagcgcaagtgggctgaggcagtggtgaggccgcctggctgttcctgtgggggctgcgggagctgtggagaccgtgagtggctaagggctgtggcctccgtgggagccgcactcattctcttcccttgcctactatacggggcatatgccttcctgccgtttgatgtcccacggctgcccaccatgagttcccgcctgatctacacactgcgctgcggggtctttgccaccttccccattgtgctggggatcctggtgtacgggctgagcctgttatgcttttctgcccttcggccctttggggagccacggcgggaggtggagatccaccggcgatatgtggcccagtcggtccagctctttattctctacttcttcaacctggccgtgctttccacttacctgccccaggataccctcaaactgctccctctgctcactggtctctttgccgtctcccggctgatctactggctgacctttgccgtgggccgctccttccgaggcttcggctacggcctgacgtttctgccactgctgtcgatgctgatgtggaacctctactacatgttcgtggtggagccggagcgcatgctcactgccaccgagagccgcctggactacccggaccacgcccgctcggcctccgactacaggccccgcccctggggctgagcctctccgccctcgccctcggagtagggggtagcggcttgggtctgacacatctttgaaccttgtggccaggcctggacttcgcccccaggcctaggaccgcggtgggtggaaccctgctactgccccaacagggactccaatcaatcggagttctccccttgccggagctgcccttcacctttggggcccgagacagtcataagggatggacttagttttcttgcagggaaaaaggtggacagccgtgtttcttaaggatgctgagggcatggggccaggaccaggggagaggcacagctccttcctgagcagcctctcaccactgccacaaggctccctaatgctggtctctgctccactccccggcttcccgtgaggcaggaggcagagccacagccaaggccctgaccacttctgtgccagttgtctaagcagagcgcctcagggacgctggaaatgccttaaggatagaggctgggcatcacatcaaatgggactgtggtgtttggtgaaaaccttcctgaggatctggattcaggaccctccatgactggcctatttactgtttacagctggccagtgcagagctgctgctcttttacctttttaggcccctgtaacttcccacctttaaactgcccagaaggcatgcctctcccacaggaagaggggagcagacagggaaatctgcctaccaagaggggtgtgtgtgtctttgtgcccacacgtggtggctggggagtgcctggatggtgcggtggttgatgttaacctagtgtgtgtgtgtgtgtgtgtgtgtgtgtgtgtaacaataaattactaccagtcaaaaaaaaaaaaaaaaaaaaaaaaaaaaaaaaaaaaaaaaaaaaaaaaa

SEQ ID NO: 502 - DNA, 434 bp, Homo sapiens
  misc_feature (209)..(209): "n" = a, t, g, or c.
tttttttgagacagagtttcactcttgttgcccaggctggagtgcaacacagcggtctcggctcactgcaacctctgcctcccaggttcaagcaattctcctgccccagcccccaagtagctggggttataggtgcccaccaccacgcctggctaatccttgcacccttagcagagacagggtttctccctgttggccaggctggctcngagctcccgaccccaggtgatccgcctgccccggccttccaaagtgccaggattacaggcatgagccactgcatctggcccttcttcttaaacactgaggtcagggtgatctctagggacagcctgacacaaccaggatgatggagaaaatacacaccttggtggtggtatagaaagcctcgatcatctactagccaatgcttccagcccctctcccatcctttc

SEQ ID NO: 503 - DNA, 425 bp, Homo sapiens
  misc_feature (309)..(309): "n" = a, t, g, or c.
  misc_feature (345)..(345): "n" = a, t, g, or c.
  misc_feature (353)..(353): "n" = a, t, g, or c.
  misc_feature (385)..(385): "n" = a, t, g, or c.
  misc_feature (411)..(411): "n" = a, t, g, or c.
  misc_feature (416)..(416): "n" = a, t, g, or c.
ttttttttcctgggtctgagggtttattggtcagggcccaggcagatgtcatgtgcccctgttgtccccacgcaggcccacagacgtcacaggagaatgatttacaagccacttggggcctgctggcagtgagggtttacccaccccccgccccagcttgctccagtgccgccgtttacgtcatgggtacgtggcctgcagttcacggatctccaggcccatcctgttgactgcatacccagtgaggcttcgagcctgccagaggtcaatacagcccagcagactaaagtcagttttccaaaaggactnttggaattcagcaaaattgaaatgggaaagggtccnttaaaagnggtaattcatttccaccatttgtaccagattnggcaagcacttgaagggccccggaanaaggntcttgggaa

SEQ ID NO: 504 - DNA, 2221 bp, Homo sapiens
gcttgctaaccacaaaacccgccaggccggtgcgggagctgcggagcatccgctgcggtcctcgccgagacccccgcgcggattcgccggtccttcccgcgggcgcgacagagctgtcctcgcacctggatgacagcaggggcgccggggtcctctcgacgccagagagaaatctcatcatccgtgcagccttcttaaagcaaactaagaccagagggaggattatccttgacctttgaagaccaaaactaaactgaaatttaaaatgttcttcgggggagaagggagcttgacttacactttgggaatcagaggcaatgagcccgtatatacttcaactcaagaagactgcattaattcttgctgttcaacaaaaaacatatcaggggacaaagcatgtaacttgatgatcttcgacactcgaaaaacagctagacaacccaactgctacctatttttctgtcccaacgaggaagcctgtccattgaaaccagcaaaaggacttatgagttacaggataattacagattttccatctttgaccagaaatttgccaagccaagagttaccccaggaagattctctcttacatggccaattttcacaagcagtcactcccctagcccatcatcacacagattattcaaagcccaccgatatctcatggagagacacactttctcagaagtttggatcctcagatcacttggagaaactatttaagatggatgaagcaagtgcccagctccttgcttataaggaaaaaggccattctcagagttcacaattttcctctgatcaagaaatagctcatctgctgcctgaaaatgtgagtgcgctcccagctacggtggcagttgcttctccacataccacctcggctactccaaagcccgccacccttctacccaccaatgcttcagtgacaccttctgggacttcccagccacagctggccaccacagctccacctgtaaccactgtcacttctcagcctcccacgaccctcatttctacagtttttacacgggctgcggctacactccaagcaatggctacaacagcagttctgactaccacctttcaggcacctacggactcgaaaggcagcttagaaaccataccgtttacagaaatctccaacctaactttgaacacagggaatgtgtataaccctactgcactttctatgtcaaatgtggagtcttccactatgaataaaactgcttcctgggaaggtagggaggccagtccaggcagttcctcccagggcagtgttccagaaaatcagtacggccttccatttgaaaaatggcttcttatcgggtccctgctctttggtgtcctgttcctggtgataggcctcgtcctcctgggtagaatcctctcggaatcactccgcaggaaacgttactcaagactggattatttgatcaatgggatctatgtggacatctaaggatggaactcggtgtcccttaattcatttagtaaccagaagcccaaatgcaatgagtttctgctgacttgctagtcttagcaggaggttgtattttgaagacaggaaaatgcccccttctgctttccttttttttttttggagacagagtcttgctctgttgcccaggctggagtgcagtagcacgatctcggctctcaccgcaacctccgtctcctgggttcaagcgattctcctgcctcagcctcctaagtatctgggattacaggcatgtgccaccacacctgggtgatttttgtatttttagtagagacggggtttcaccatgttggtcaggctggtctcaaactcctgacctagtgatccaccctcctcggcctcccaaagtgctgggattacaggcatgagccaccacagctggcccccttctgttttatgtttggtttttgagaaggaatgaagtgggaaccaaattaggtaattttgggtaatctgtctctaaaatattagctaaaaacaaagctctatgtaaagtaataaagtataattgccatataaatttcaaaattcaactggcttttatgcaaagaaacaggttaggacacctaggttccaattcattcacattcttggttccagataaaatcaactgtttatatcaatttctaatggatttgcttttctttttatatggattcctttaaaacttattccagatgtagttccttccaattaaatatttgaataaatcttttgttactc

SEQ ID NO: 505 - DNA, 582 bp, Homo sapiens
  misc_feature (525)..(525): "n" = a, t, g, or c.
  misc_feature (553)..(553): "n" = a, t, g, or c.
gaatggagtgaagaaaggcagtatggcaggcaccagcaaagagttgagggctgttgctcttaaaaattattttttttattattattttgaaagtatggaagttttccattcactggggaaaggagggaaaagtgcatttatttttatacagagttacttaattacctccaaaacacatatgttggaaatcgcttttgctggtgcaaagtatattaatgagcaggaatacatacattgaggttatgaatagagagctcaatttgtacctttgctgtcttgctcaagcttggtatggcatgaaaactcgactttattccaaaagtaacttcaaaatttaaaatactagaacgtttgctgcgataaatcttttgggatttttgtgtttttctaatgagaatactgtttttcattacctaaagaacaatttgctaaacatgagaaatcactcactttgattatggtatagattacataggaagaacaatcacatcagtaagttatagtttatattaaaggtaattttcnggtggccccataaccaatataccagcantccatgatagcatttcagcatttcccaag

SEQ ID NO: 506 - DNA, 565 bp, Homo sapiens
tttttttttttttatacaaaacagaaaaaaacaaaacactttattttccacaaggaagagcaataggaaaaattaaatcatttcccacatattgttttcttaaaacagagcctacaaggacatattcagcaccaaataaaaaaggaaaaaaagagaaattacaaacagccatagaatataatctataaagcaaacatttaatattgcactttgttttgctaacattttggattttacttttcctaattgaaaaatcaggaatctatcttgaatactggaatacaactgtgaacctcacatcttatgtcaggaattgaccaatatttttaaaaaagtaatgcctctaaagaaatacattttaaaggggaaaataaaactttatttgataaagttttatacatttaaagttttatcacattttgtgatccagtgccaattatcagaatattggtcattcttgcttcatgtgttatttgtaagagtatataatgacaagtattccaatgctatgcatatcaacaattgttccctagtcagttagacgtaagagagaaaagggattttc

SEQ ID NO: 507 - DNA, 470 bp, Homo sapiens
  misc_feature (37)..(37): "n" = a, t, g, or c.
  misc_feature (377)..(377): "n" = a, t, g, or c.
  misc_feature (412)..(412): "n" = a, t, g, or c.
  misc_feature (449)..(449): "n" = a, t, g, or c.
  misc_feature (454)..(454): "n" = a, t, g, or c.
tttctttggagacagagcccgcttgtgttgcccaggntggattgcagtggcacaatcttggctcacttcaatctctacctcccaggttcaagagattcttccgcctcagcctcctgagtagctgggattacaggcacatgcctacacaccgggctaaggagtaaacattttagtaaccaagtggacactgaagatgttgagaactggtaaacaaacaatcaagcaagtaagaacagaaataacagcatttggcttttgagttaatgacaagaacactcggcatgggagcctggggtgagcaaatcacagatcttcaagcttctgtaagtggcctgcattgggggtcaccgtgggtagcttacgtggcaccctgggantttccacagtgcttctcttgaggccagccaccagnggtaggagggccagcttagttagggagtccccacttnccccnttcgaaaggggctttc

SEQ ID NO: 508 - DNA, 760 bp, Homo sapiens
gagttttcatttgtggtgagattctctcccaggccacaagacatttcctgctcggaaccttgtttactaatttccactgcttttaaggccctgcactgaaaatgcaagctcaggcgccggtggtcgttgtgacccaacctggagtcggtcccggtccggccccccagaactccaactggcagacaggcatgtgtgactgtttcagcgactgcggagtctgtctctgtggcacattttgtttcccgtgccttgggtgtcaagttgcagctgatatgaatgaatgctgtctgtgtggaacaagcgtcgcaatgaggactctctacaggacccgatatggcatccctggatctatttgtgatgactatatggcaactctttgctgtcctcattgtactctttgccaaatcaagagagatatcaacagaaggagagccatgcgtactttctaaaaactgatggtgaaaagctcttaccgaagcaacaaaattcagcagacacctcttcagcttgagttcttcaccatcttttgcaactgaaatatgatggatatgcttaagtacaactgatggcatgaaaaaaatcaaatttttgatttattataaatgaatgttgtccctgaacttagctaaatggtgcaacttagtttctccttgctttcatattatcgaatttcctggcttataaactttttaaattacatttgaaatataaaccaaatgaaatattttaactgataaaaaaaaaaaaaaaaaataaaaaa

SEQ ID NO: 509 - DNA, 427 bp, Homo sapiens
ttttttttttttttttttttttttttttttttttttttgatgggaaaaacatttataattttttggagttacagggggtattttcattataatcattcttacaataaatacagaagggctaaacagaccattatcacaggggcctgggggctgaggcacaggaactgaggggggctgcaaacaccagtgcttttccagggctggccaggacaccttcaaagaggctagtgaaaaggaaaggaatgtagggggaatttgaaatgggattaatagagtcaatgcagcacatgctaaaaacagatacagagttttttgggggtttttaactattttaccagatgatcctaacttaacaaaccgaacaaagaaagagattcaagatctcacatgagtgaaaatccagggccttcccctttggccctggccc

SEQ ID NO: 510 - DNA, 429 bp, Homo sapiens
tttttttttgttgttaagactggtgatatgggggactatttattctgccttaaatcaatggcaaataagtcaagatgacattttgtgaatgtagactatggatacactcctaatagattgatgtagtcataaaagggggtcaagtagatgtttttctgttatgtaagcaataatttttccgtgtcttattgagtatggctagcgattatttattacatgctagatgggttctttgcatgtgggttccatataggtgcagaaatttcctcagccactggagggattttcgaccatatttgtcatttggatgagctgttattagattgaaatctacacatcatttcattaaaaattgtgccttagaaaacgcaaagctgttgcacatggcgataaattatggatgcagtacattgaagagagatgaagtca

SEQ ID NO: 511 - DNA, 572 bp, Homo sapiens
  misc_feature (558)..(558): "n" = a, t, g, or c.
tgaaactcagtggctctatctaaccttactatctcctcactctttctctaagactaaactctaggctcttaaaaatctgcccacaccaatcttagaagctctgaaaagaatttgtctttaaatattttttaatagtaacatgtattttatggaccaaattgacattttcgactattttttccaaaaaagtcaggtgaatttcagcacactgagttgggaatttcttatcccagaagaccaaccaatttcatatttatttaagattgattccatactccgttttcaaggagaatccctgcagtctccttaaaggtagaacaaatactttctatttttttttcaccattgtgggattggactttaagaggtgactctaaaaaaacagagaacaaatatgtctcagttgtattaagcacggacccatattatcatattcacttaaaaaaatgatttcctgtgcaccttttggcactctcttttcaatgtgggaaaacttagtcaccctgaaacccacaaataaataaacttgtgatgtgggcagaggttggggtggcatgntgtgttaattaacc

SEQ ID NO: 512 - DNA, 537 bp, Homo sapiens
  misc_feature (281)..(281): "n" = a, t, g, or c.
  misc_feature (445)..(445): "n" = a, t, g, or c.
  misc_feature (486)..(486): "n" = a, t, g, or c.
  misc_feature (492)..(492): "n" = a, t, g, or c.
  misc_feature (504)..(504): "n" = a, t, g, or c.
  misc_feature (513)..(513): "n" = a, t, g, or c.
  misc_feature (521)..(521): "n" = a, t, g, or c.
  misc_feature (527)..(527): "n" = a, t, g, or c.
ttttttttgttttaaacactttatttataaaaaagtacatttttaatcctcagtacattttcaacccatcatttttttttaatacaagtaaaagggggtgatgcaaacacccccaggtcagaaccaggaggatctgctgggctgtccctggaccaaaggcggaaagggcgacaagacgccgaagcaaggtagcgcatcacgctgggaggggagggtggcagcttctcctgggattcttttcatttatacaaaaaaggaaaaccaattttttcgaccaagantcccattcctcacaggcaggggtcagaagagcagcagcaccgagtggggacaggggctcctcctgggccttcacaagctggggcagtttttgggcagcagtggccagcagcagaggggcctgcctcctggggattccccggttatttgggcattttttgaagcntccttttgggtttttggggacctcggggcacaaccaccttncccttnattaggggaggnttttttttngcattcangttttngggtttcttt

SEQ ID NO: 513 - DNA, 2068 bp, Homo sapiens
ttgaactcctggagcccgtcacccaggaaaccggccgcaatcgccggccgacctgaagctggtttcatggcagcctcaaagaaggcagttttggggccattggtgggggcggtggaccagggcaccagttcgacgcgctttttggttttcaattcaaaaacagctgaactacttagtcatcatcaagtagaaataaaacaagagttcccaagagaaggatgggtggaacaggaccctaaggaaattctacattctgtctatgagtgtatagagaaaacatgtgagaaacttggacagctcaatattgatatttccaacataaaagctattggtgtcagcaaccagagggaaaccactgtagtctgggacaagataactggagagcctctctacaatgctgtggtgtggcttgatctaagaacccagtctaccgttgagagtcttagtaaaagaattccaggaaataataactttgtcaagtccaagacaggccttccacttagcacttacttcagtgcagtgaaacttcgttggctccttgacaatgtgagaaaagttcaaaaggccgttgaagaaaaacgagctctttttgggactattgattcatggcttatttggagtttgacaggaggagtcaatggaggtgtccactgtacagatgtaacaaatgcaagtaggactatgcttttcaacattcattctttggaatgggataaacaactctgcgaattttttggaattccaatggaaattcttccaaatgtccggagttcttctgagatctatggcctaatgaaagctggggccttggaaggtgtgccaatatctgggtgtttaggggaccagtctgctgcattggtgggacaaatgtgcttccagattggacaagccaaaaatacgtatggaacaggatgtttcttactatgtaatacaggccataagtgtgtattttctgatcatggccttctcaccacagtggcttacaaacttggcagagacaaaccagtatattatgctttggaaggttctgtagctatagctggtgctgttattcgctggctaagagacaatcttggaattataaagacctcagaagaaattgaaaaacttgctaaagaagtaggtacttcttatggctgctacttcgtcccagcattttcggggttatatgcaccttattgggagcccagcgcaagagggataatctgtggactcactcagttcaccaataaatgccatattgcttttgctgcattagaagctgtttgtttccaaactcgagagattttggatgccatgaatcgagactgtggaattccactcagtcatttgcaggtagatggaggaatgaccagcaacaaaattcttatgcagctacaagcagacattctgtatataccagtagtgaagccctcaatgcccgaaaccactgcactgggtgcggctatggcggcaggggctgcagaaggagtcggcgtatggagtctcgaacccgaggatttgtctgccgtcacgatggagcggtttgaacctcagattaatgcggaggaaagtgaaattcgttattctacatggaagaaagctgtgatgaagtcaatgggttgggttacaactcaatctccagaaagtggtattccataaaacctaccaactcatggattcccaagatgtgagctttttacataatgaaagaacccagcaattctgtctcttaatgcaatgacactattcatagactttgattttatttataagccacttgctgcatgaccctccaagtagacctgtggcttaaaataaagaaaatgcagcaaaaagaatgctatagaaatatttggtggtttttttttttttaaacatccacagttaaggttgggccagctacctttgggggtgaccccccccattgccataacatcctgctccattccctctaagatgtaggaagaattcggatccttaccattggaatcttccatcgaacatactcaaacacttttgggccaggatttgagtctctgcatgacatatacttgattaaaaggttattactaacctgttaaaaatc

SEQ ID NO: 514 - DNA, 990 bp, Homo sapiens; identical to SEQ ID NO: 355
  misc_feature (543)..(543): "n" = a, t, g, or c.
  misc_feature (580)..(580): "n" = a, t, g, or c.
  misc_feature (584)..(584): "n" = a, t, g, or c.
  misc_feature (604)..(604): "n" = a, t, g, or c.
  misc_feature (608)..(608): "n" = a, t, g, or c.
  misc_feature (615)..(615): "n" = a, t, g, or c.
  misc_feature (636)..(636): "n" = a, t, g, or c.
  misc_feature (640)..(640): "n" = a, t, g, or c.
  misc_feature (646)..(646): "n" = a, t, g, or c.
  misc_feature (697)..(697): "n" = a, t, g, or c.
  misc_feature (926)..(926): "n" = a, t, g, or c.

SEQ ID NO: 515 - DNA, 1049 bp, Homo sapiens; identical to SEQ ID NO: 471

SEQ ID NO: 516 - DNA, 1094 bp, Homo sapiens; identical to SEQ ID NO: 472

SEQ ID NO: 517 - DNA, 3163 bp, Homo sapiens
cctttgccctgaagggggctggatgggcaaggcggccgcgatggctcgagctcgggcggtggcggcggtggccggaggcggcggtgcctcctcctcctcgccccggcgccggcggtgatccgagcgagcggccgcggcccccgatgagactgctggcgggctggctgtgcctgagcctggcgtccgtgtggctggcgcggaggatgtggacgctgcggagcccgctcacccgctccctgtacgtgaacatgactagcggcccgggtgggccggcggcggccgcgggcggcaggaaggagaaccaccagtggtatgtgtgcaacagagagaaattatgcgaatcactccaggctgtctttgttcagagttaccttgatcaaggaacacagatcttcttaaacaacagcattgagaaatcgggctggctatttatccaattatatcattcttttgtgtcatctgtttttagcctgtttatgtctagaacatctatcaatgggttgctaggaagaggctcaatgtttgtgttttcaccagatcagtttcagagactgcttaaaattaatccagactggaaaacccacagacttcttgatttaggtgctggagatggagaagtcacaaaaatcatgagccctcattttgaagaaatctatgccactgagctttctgaaactatgatatggcagcttcagaaaaagaaatacagagtccttggtataaatgaatggcagaatacggggttccagtatgatgtcatcagctgcctgaacttgctggaccgctgtgatcagcccctgactttgttaaaagatatcagaagtgtcttggagccaactagaggcagggtcatccttgcccttgtcctcccctttcatccctatgtggaaaacgtaggtggcaagtgggagaaaccatcagaaattttggaaatcaaaggacagaactgggaagaacaagtgaatagtctgcctgaagttttcagaaaagctggttttgttatcgaagctttcaccagactaccatacctgtgtgaaggcgacatgtataatgactactacgttctggatgacgctgtctttgttctcaaaccagtataaacacgtggaggtcgaagtcttcagagtccgcaccctccgggatgtgcccttggaagagggtctgtgttcacaattacgtgaagggaggacccttggggaccgccattctaaatatcatgtaggaatttaaaaagccaaaatactaattatttctttgtagtgtgtaaaggaatgtttttaaaagacaaaaacccaactctttgtggatttttatcaactctttactcagagccactctccaatgcaggtcacactccaattatgatggaagatattttttatacttaattgcagtagggactcattcccagacaaagcaatagtcacgacttcatggaaccaatcaatggattgttttttgaagactggcaataaagctgtccattcaattccaaatactggttttaaggtatagccactgatattctttcatgtttagaaattctttctgttattattcaagaaaatgtttttaatcatgctaataaacttttttggagatgactttggcatcatgtttgaattcatataaagctcccctagcattttttattggtttggcttcaggagtacccaaatagtagcattatgagaatgacgcagacaatttgaataggggggaaggaaggcttcagacttgggggaaggggagattattgcaaattgcagtgaacactgagtcagtaaaaaaaaaaaacagaaacaaaaacccagcctcattcagatacagaacttcagggacccctccccccacccccccagttaatgctgctgtgaaaaatgcaaaataacctggttctgactttgtgatcactcatgtcccatacactgaactttgtttttttctggacaatctcaggttctcagaattgaaacattcagttttgtctactgacaaaatgcaactaaaaatgttttaattcaacttcttactctacacttatatacctctctcccagagcttggctcttccctgaaatccttaaaggagtttattatttgccaagaatatggtttgatgaagaccgtgtcagactcatgcattctggaatccgtgagtgcctccaaccataaacccagaaatgctgccatagaggaacccattagcaagatcaataaccatcgtggatattccaaagagcagagcatttaacccagaatctgaaatctcagtaataacagaaatgtcaatatgagattgtggttattaacaatatgttatcctcactactttatttcttttttcatccaggtgtttcattaagtattctcatttatatgctcatagaagtcatcagatcaacacattcactccaacacctgggtataaaggcgaattaaaacctgaagaattactttattattcattaagaactgcattcccacatcctcacaccaatatcttccactgttactgtgcagtcataataagagttgggttatgtgatttatgcaaaattgttattggtgtgttctaatgatttttttccaggaattcaagtaagtgaagtacaaatacttagcaccatagattgtaaaaatagaaagaggaaatgagaaaacttaatgtcgttcttgtacagttgagttttgcttctttataaactgtctgttaaaatcaggggttgctgttagactgtcaagcagaagtgatggatgttcaaggaggcaggttgccccaaagtgttttctaactttcaagtagagaactttatgctctaataagaaaaatacaactcattcttaaccacccccccaaaacagagaaaacacatacatttatgcattttaaagataaaaagtagtttctcaaaaaaatctgaagttctctgaaaaccagcttattaaaagtgctgttttgtggtgaaaattgaaaccaaatccactcacatttcctatcgggtcttgaaattcttggtggtgtgtcaccattccactagatggcagtgttgcttactgagtgtcaatggcttttttccccgtaaatggaatcatgtttttctcccccaaagtacaataaagctgccttgtctgcaccaaaaacaaaaaaaaaaaaaaaaaaa

SEQ ID NO: 518 - DNA, 2218 bp, Homo sapiens
catggccagcacatccaccaccatcaggagccacagcagcagccgccggggtttcagtgccagctcagccaggctccctggggtcagccgctctggcttcagcagcatctccgtgtcccgctccaggggcagtggtggcctgggtggcgcatgtggaggagctggctttggcagccgcagtctgtatggcctggggggctccaagaggatctccattggagggggcagctgtgccatcagtggcggctatggcagcagagccggaggcagctatggctttggtggcgccgggagtggatttggtttcggtggtggagccggcattggctttggtctgggtggtggagccggccttgctggtggctttgggggccctggcttccctgtgtgcccccctggaggcatccaagaggtcactgtcaaccagagtctcctgactcccctcaacctgcaaattgaccccgccatccagcgggtgcgggccgaggagcgtgagcagatcaagaccctcaacaacaagtttgcctccttcatcgacaaggtgcggttcctagagcagcagaacaaggttctggacaccaagtggaccctgctgcaggagcagggcaccaagactgtgaggcagaacctggagccgttgttcgagcagtacatcaacaacctcaggaggcagctggacagcatcgtgggggaacggggtcgtctggactcggagctgagaaacatgcaggacctggtggaggacctcaagaacaaatatgaggatgaaatcaacaagcgcacagcagcagagaatgaatttgtgactctgaagaaggatgtggatgctgcctacatgaacaaggttgaactgcaagccaaggcagacactcttacagatgagatcaacttcctgagagccttgtatgatgcagagctgtcccagatgcagacccacatctcagacacatccgtggtgctatccatggacaacaaccgcaacctggacctggacagcatcatcgctgaggtcaaggcccaatatgaggagattgctcagaggagcagggctgaggctgagtcctggtaccagacaaagtacgaggagctgcaggtcacagcaggcagacatggggacgacctgcgcaacaccaagcaggagattgctgagatcaaccgcatgatccagaggctgagatctgagatcgaccacgtcaagaagcagtgtgccaacctacaggctgccattgctgatgctgagcagcgtggggagatggccctcaaggatgctaagaacaagctggaagggctggaggatgccctgcagaaggccaagcaggacctggcccggctgctgaaggagtaccaggagctgatgaacgtcaagctggccctggacgtggagatcgccacctaccgcaagctgctggagggcgaggagtgcaggctgaatggcgaaggcgttggacaagtcaacatctctgtagtgcagtccaccgtctccagtggctatggcggtgccagcggtgtcggcagtggcttaggcctgggtggaggaagcagctactcctatggcagtggtcttggcgttggaggcggctttagttccagcagcggcagagccactgggggtggcctcagctctgttggaggcggcagttccaccatcaagtacaccaccacctcctcctccagcaggaagagctacaagcactgaagtcgtgccgccagctctcagtcccacagctctcaggcccctctctggcagcagagccctctcctcaggttgcttgtcctcccctggcctccagtctcccctgccctcccgggtagagctgggatgccctcacttttcttctcatcaatacctgttccactgagctcctgttgcttaccatcaagtcaacagttatcagcactcagacatgcgaatgtcctttttagttcccgtattattacaggtatctgagtctgccataattctgagaagaaaaatgacctatatccccataagaactgaaactcagtctaggtccagctgcagatgaggagtcctctctttaattgctaaccatcctgcccattatagctacactcaggagttctcatctgacaagtcagttgtcctgatcttctcttgcagtgtccctgaatggcaagtgatgtaccttctgatgcagtctgcattcctgcactgctttctctgctctctttgccttcttttgttctgttgaataaa

SEQ ID NO: 519 - DNA, 2068 bp, Homo sapiens
ctgcacagggagtttgtcttgtgcaaacaatttccaaggcagcgttttcttccctgcctgggagtgcagggctcagcgccttcactttggaactgactcagagacctaaagaagcccacctggccagcgggaaggggggccgccgccgcctcccggttttgggcagccctggccagctccctgtggccttggaggacttccaccgggcaggcgttcccatgatgccaggctaccaggcgcgggggattcctgcaggccggcgctgcttttcttagaaccccctttctagaaaagtacacctggaggttttgcttcaaagagaggagaggcagcagcatggcgagtgtcctgtcccgacgccttggaaagcggtccctcctgggagcccgggtgttgggacccagtgcctcggaggggccctcggctgccccaccctcggagccactgctagaaggggccgctccccagcctttcaccacctctgatgacaccccctgccaggagcagcccaaggaagtccttaaggctcccagcacctcgggccttcagcaggtggcctttcagcctgggcagaaggtttatgtgtggtacgggggtcaagagtgcacaggactggtggagcagcacagctggatggagggtcaggtgaccgtctggctgctggagcagaagctgcaggtctgctgcagggtggaggaggtgtggctggcagagctgcagggcccctgtccccaggcaccacccctggagcccggagcccaggccctggcctacaggcccgtctccaggaacatcgatgtcccaaagaggaagtcggacgcagtggaaatggatgagatgatggcggccatggtgctgacgtccctgtcctgcagccctgttgtacagagtcctcccgggaccgaggccaacttctctgcttcccgtgcggcctgcgacccatggaaggagagtggtgacatctcggacagcggcagcagcactaccagcggtcactggagtgggagcagtggtgtctccaccccctcgcccccccacccccaggccagccccaagtatttgggggatgcttttggttctccccaaactgatcatggctttgagaccgatcctgaccctttcctgctggacgaaccagctccacgaaaaagaaagaactctgtgaaggtgatgtacaagtgcctgtggccaaactgtggcaaagttctgcgctccattgtgggcatcaaacgacacgtcaaagccctccatctgggggacacagtggactctgatcagttcaagcgggaggaggatttctactacacagaggtgcagctgaaggaggaatctgctgctgctgctgctgctgctgccgcaggcaccccagtccctgggactcccacctccgagccagctcccacccccagcatgactggcctgcctctgtctgctcttccaccacctctgcacaaagcccagtcctccggcccagaacatcctggcccggagtcctccctgccctcaggggctctcagcaagtcagctcctgggtccttctggcacattcaggcagatcatgcataccaggctctgccatccttccagatcccagtctcaccacacatctacaccagtgtcagctgggctgctgccccctccgccgcctgctctctctctccggtccggagccggtcgctaagcttcagcgagccccagcagccagcacctgcgatgaaatctcatctgatcgtcacttctccaccccgggcccagagtggtgccaggaaagcccgaggggaggctaagaagtgccgcaaggtgtatggcatcgagcaccgggaccagtggtgcacggcgtgccggtggaagaaggcctgccagcgctttctggactgagctgtgctgcaggttctactctgttcctggccctgccggcagccactgacaagaggccagtgtgtcaccagccctcagcagaaaccgaaagagaaagaacggaaacacggagtttgggctctgttggctaaggtgtaacacttaaagcaattttctcccattgtgcgaacattttattttttaaaaaaaa

SEQ ID NO: 520 - DNA, 1404 bp, Homo sapiens
cggcgttctccacctgcgcgggcctgaatggccttcaggagcacagtcggcctgaggagttgacggttactcaccgccgtgagcccaagtaactcgccctccttcggctaaaaaccctccgcctgggcccgcgcgacaggagcgcggtctctgaggggagcggcgaccccgccagccccggtctctttccctggcggcggcggcttcttccgtgggacaatatgttcaagagaatggccgaatttgggcctgactccggcgggagagtaaagggtgttactatcgttaaaccaatagtttacggtaatgttgctcggtattttggaaagaaaagagaagaagatgggcacactcatcagtggacagtatatgtgaaaccatatagaaatgaggatatgtcagcatatgtgaagaaaatccagtttaaattacatgaaagctatggcaatcctttaagagttgttactaaacctccatatgaaattactgaaacaggatggggtgaattcgaaataatcatcaaaatatttttcattgaccctaatgaaagacctgtaaccctgtatcatttgctaaagctgtttcaatcagacaccaatgcaatgctggggaaaaagacagtggtttcagagttctatgatgaaatgatatttcaagacccaacagcaatgatgcaacaattattgacaacatctcgtcagctaacattaggagcctataagcatgaaacagaatttgcagagcttgaagtgaaaaccagagaaaaattagaagctgctaagaaaaaaacaagctttgagattgcagagcttaaggagagattaaaagcaagtcgtgaaactataaattgtttaaaaaatgaaatcagaaaacttgaagaagatgaccaagcaaaagacatataaacagttctcatgagaacttggtagtaagctaaactgaaaataaggtgggcttcactggagaaatggacttactgcaaatgctgtgatgtttcttagaggaacttcatatacagctgttgaccatgaatttcttagcaataggaatttgtactatttaagcaatctttaatggaaaatatgtgtgtaagaatggatgctatataggtattttaccaacccattttaagaaaattctatgatattaagcacagtttttaaaaatgtttattgtagtatatgtatagcttattacccttttgacaggcatcaaaatttcattataaagtattacttgtacaaattttgtacttctttagtggctagaattagtgaagaaacttaatgtgtatatttaatttcttcaagttcttacctgcccccatccttttttgtatatgatgtgtccagtaagtattcaataaatgtagtttacagatcctaaaaaaaaaaaaaaaaaaaa

SEQ ID NO: 521 - DNA, 562 bp, Homo sapiens
ttttaattgataaatattcattttttatttgaaaagtgtgcaggaacaatcactgaatacaattctcaaccatagtattcatagccagacaccaaaaaatcattggatgctatgatttctgaagccactagaactttggtacaacaaaataatgacctaacagtgtgcgtcaggaaccacagtctattaaggggcatatagaataaaaacttcaagtttatagttttaagttacattcatagcacctagacaaaacaaaatctatataggagacagacaaaataatcaaacgtgcttagcctaaaaataaagataatattacttgaaggtaaactgttgggatacaatgaagcacttcagtgttatattagaacatcgtctacttttaacacactaaagcaggataatttatttttttaaaaaataatttcagatacaatcagtatctcttacaaggctatggacacagaagccctatttgtacatggaatattttgaccaacttgtaatatactacctagaattcattggtttccttgaaataaatacaagatgacatatt

SEQ ID NO: 522 - DNA, 885 bp, Homo sapiens
  misc_feature (814)..(814): "n" = a, t, g, or c.
gacagctgacgctgcagcagtttgcgcagtccacagagatgctgaagcgcgtggtgcaggagcatctcccgctgatgagcgaggcgcgtgctggcctgcctgacatggaggctgtggcaggtgccgaagccctcaatggccagtccgacttcccctacctgggcgctttccccatcaacccaggcctcttcattatgaccccggcaggtgtgttcctggccgagagcgcgctgcacatggcgggcctggctgagtaccccatgcagggagagctggcctctgccatcagctccggcaagaagaagcggaaacctgcggcatgtgcgcgccctgccggcggcgcatcaactgcgagcagtgcagcagttgtaggaatcgaaagactggccatcagatttgcaaattcagaaaatgtgaggaactcaaaaagaagccttccgctgctctggagaaggtgatgcttccgacgggagccgccttccggtggtttcagtgacggcggcggaatccaaagctgccctctccgtgcaatgtcactgctcgtgtggtctccagcaaggattcggcgaagaaaacggatgcaccgtctttacgaacataatattcttacagatgcattctgttttataaacatgttgttgcgtctacattcacgtctagataacaaaacacaagtcttatagcgccgagtaccgttagtaggtaatagttcatgctcgttaacgctatgaactgggtacaatatcttcgatcgttcacaggtataagaaacgcgaatctcctcttaaagcgtgaaggagcgtcggggtctaanaacaggtttttttttgcgcaacgtggttctcgatagtggcggctgggttttcacgtcgggaacaagtgcct

SEQ ID NO: 523 - DNA, 5879 bp, Homo sapiens; identical to SEQ ID NO: 433

SEQ ID NO: 524 - DNA, 2691 bp, Homo sapiens; identical to SEQ ID NO: 319

SEQ ID NO: 525 - DNA, 4180 bp, Homo sapiens; identical to SEQ ID NO: 320

SEQ ID NO: 526 - DNA, 4248 bp, Homo sapiens; identical to SEQ ID NO: 329

SEQ ID NO: 527 - DNA, 1167 bp, Homo sapiens
agcctggacccattcagtcagaggcagccagcgggacctgcttcaccgagcgcagcgaagccgagacccgggctggcccctctgctgcccccggagcgggccatgccgccgcgggagctgagcgaggccgagccgcccccgctccgggccccgacccctcccccgcggcggcgtagcgcgcccccagagctgggcatcaagtgcgtgctggtgggcgacggcgccgtgggcaagagcagcctcatcgtcagctacacctgcaatgggtaccccgcgcgctaccggcccactgcgctggacaccttctctgtgcaagtcctggtggatggagctccggtgcgcattgagctctgggacacagcgggacaggaggattttgaccgacttcgttccctttgctacccggataccgatgtcttcctggcgtgcttcagcgtggtgcagcccagctcctttcaaaacatcacagagaaatggctgcccgagatccgcacgcacaacccccaggcgcctgtgctgctggtgggcacccaggccgacctgagggacgatgtcaacgtactaattcagctggaccaggggggccgggagggccccgtgccccaaccccaggctcagggtctggccgagaggatccgagcctgctgctaccttgagtgctcagccttgacgcagaagaacttgaaggaagtatttgactcggctattctcagtgccattgagcacaaagcccggctggagaagaaactgaatgccaaaggtgtgcgcaccctctcccgctgccgctggaagaagttcttctgcttcgtttgagcagctatggctgcatagcaagtagtaggcaggaggccaaagacttctgagacctggggcacccgggcctttgcggcagctactggcagggcctggccacctcataggactcagttcccttctgaacactcgggggacatgggcctctaactgcccactctgatatgcctgggtgagcctaggagggaaggctctgatttggatttctccagtcaaagctcacagaaaaaaacctggcactttgattttcatgggatggtcctaacagggtcagtcacctccgagcagtttgggaacccagtttcttgtcctgggccctcaggtcagcctggctgaattaggacccttccttgg

SEQ ID NO: 528 - DNA, 1534 bp, Homo sapiens; identical to SEQ ID NO: 398

SEQ ID NO: 529 - DNA, 429 bp, Homo sapiens
  misc_feature (58)..(58): "n" = a, t, g, or c.
  misc_feature (334)..(334): "n" = a, t, g, or c.
  misc_feature (357)..(357): "n" = a, t, g, or c.
  misc_feature (415)..(415): "n" = a, t, g, or c.
  misc_feature (429)..(429): "n" = a, t, g, or c.
tgcgggaaggaggtaggagtcaagtccaataaataagtgtaaaaatattcagtacatnggcatggttatttaatacaacagaatttgctctgagttggaaggacaggggtttcagcctatgtgtttatgatacaacaaagggacttttaggctgataaagttatggaacatgagacttcagtcttcttattaaatggccaaatggaccaagtgtttgcatgaaagctaatctttcctttcatgaaaaggaaattaaacccacttgctccccgaatgggatgattttcaggagtcctgagccatggttcctggcagaaagctggggggcctgtgncccttaaagccaggactgctggnccatcccaggccggttaattattatccagggaacgccctaaacattgcctcctttccngcaggtttcatggn

SEQ ID NO: 530 - DNA, 416 bp, Homo sapiens
tttttgcttttagattgctacagagtatgaaacttccatcatacaaagtcaaatgtaaattacattatttagagaatttggaccacttttaaaggtttcaattggttaattattccacaaaatagaatatttattatatgctagacagagttttatgtgccttacaggtaaggtttagctattttaagccgtcataacaaccattgatggtaggtattattagtatcatctacattttataaatgaggaaaaagatgcatagaaaaaccaactagattccccaaagtcacaaagtgagtaaatgttgcagtcagaacctgtccagggacagataatctggctgcagagcctgcatgccaaaccctaagtatgctgtctcccaatcaatcaagcaagcaggctccatctcacacata

SEQ ID NO: 531 - DNA, 159 bp, Homo sapiens
ctttcttccctcctccactactccctcacatataagtgtgtgtgtatatatgtatttcatacatatatattagttcatacctctatacacacacacacatatatacatatatagtccatttgaccagcacagtgttctgttatatttaattgcatctga

SEQ ID NO: 532 - DNA, 605 bp, Homo sapiens
  misc_feature (1)..(1): "n" = a, t, g, or c.
  misc_feature (460)..(460): "n" = a, t, g, or c.
  misc_feature (467)..(467): "n" = a, t, g, or c.
  misc_feature (489)..(489): "n" = a, t, g, or c.
  misc_feature (536)..(536): "n" = a, t, g, or c.
  misc_feature (587)..(588): "n" = a, t, g, or c.
ngcacgaggtggagccccgtgattaagggatggcagaggaaggggacatgtcctttttttttttttttaacagaaaaacactcatttagatacctggtttagtaagacatctgaacaacatgaaacccaactatgtaaaagctttaaaaatccaggttatgaattagcctaaacctgtgcttatgttccattctgtttagaggaagggggatggaatccctttcacctttatatttttcatgacaagtccatggtcacatcaaaaattacttttgtctttaacacagttgaaattattaaatgttatctagacctaaccaaatcctatttccttaatgttatattcaggacagtgaaaaaaatactgttttcttttagcaaagtctgacttttaaggctcagtttttacctgattaaataaactgcccctgcttttgaggtactaaaaaattactttttngttccantgggggtcccattattactggnacttatttaaggtttacttttttatatggttttgggaaaaattttcncagcccgggccgccgggtgggcttcatgccctattaaattcccccagcctnnctttgaggggggggggc

SEQ ID NO: 533 - DNA, 487 bp, Homo sapiens
ttttttttttttcattttactgcctcttcagtttagtgcttacactgtaggatacaccatccaagaggctgtaagggtggccaagcaaagggaagacaacttcagttgggggggtggaagcacagattcaatggaaataagggtatacatcatttaacaacaaaatcaagaaaatgctaaggatgaaacagggtactcaacaatcatgctgaaacaggcataaactaggaccacgccagcaagctaataggtagatgactctactttgaatattaaatcatattacgagccaactttcttaagaaaaaccacggatatctaggattacttgactagtgtaaaatacacagttgcctgaagaacttatctctaaaaactatcacaggccccagctacctcgcactggtaagagtatactgccttttaaaaacaatcactattgcccacattattagtagtattaatgctattaataatattgcactcc

SEQ ID NO: 534 - DNA, 443 bp, Homo sapiens
ttttaactgtacttgttataattatgagattcagacatcaaaaatttcctgcagcctttgcctaggttgtatttgaaggaggaacaaagttctgtttcctcctgaagccacaacttcacaaggatgaaatcgtctttcaagaaataccctcattctagaaaagaaattcaaggaagtctagtcttaaaaaaatttgtggcaggggggtgaggggagaacgaaatcagattattaaagatccataccagtttaaagctaatgagcagcttacacactaaagcccatcttgttacaattaggacagcatctataattttcaggcggattcacattttcaaaaagagaagagaataccctagtttttcagctactgatgagttggctatataattatctagaatccgtacttttgcaagaatgtatttgcaaaaacaaaacaaatc

SEQ ID NO: 535 - DNA, 348 bp, Homo sapiens
ttttgtaccacacgatccaatcacattttattgtggggaggtcgttacctgaaggggcggcaggcacgatgggccccaggcttggacggcagcagattgaggcaagactccacgcaggacttccctaggacaagcggtgctggacggtggctgcagaggccgggagaggtgggctggccagtctcgagggaggggcggccgtgagccctggcgccaggctgtgggggctgtgggggctgagcgtccgggggcctggaggagggcagccgtcagtcatggttgcagaggctggtctggcagcaagcgatggatacgtaggggcccaggcccaggctggggatatcgggg

SEQ ID NO: 536 - DNA, 396 bp, Homo sapiens
ttttttttttttttttttttttttttttttttttttttttttttttttttgctgcaaaaaggcttttactgggcaaacggggggagtttcaacccaggggaccagtgaggggggagggcccctcctccaaaggagcagggggggcatccctgcccaggggccttaacctgaatgcactaagggctggccccttaaacaggctcaggggaggtccccccacaagggttttgggcccctcccttataaaaaccccccccctgccatgggggccggggcccttgctatcacatttgccttggttgatctcagggagggtgatctctttcagggaaaactggggggggggagatttacccttgggagggcccttcaaaaaataggagtggggggtgggga

SEQ ID NO: 537 - DNA, 289 bp, Homo sapiens
  misc_feature (48)..(48): "n" = a, t, g, or c.
  misc_feature (120)..(120): "n" = a, t, g, or c.
  misc_feature (167)..(167): "n" = a, t, g, or c.
ggtggaggggagccacaatttcagccatgacaagggttaatccctttnagagctgagggaggaggggagactggcacggagggactaaagtttccagtgtggaactttttccttcatctnatgcagcctcccccatacccagcccagggtagaaccacctgggggtnggaatagaaaactacagagagttttgggaacccaaagccacagggacttgggtcctccttcccaaatgggaaaatgggagctgggagatcaccttgcagagtgaccccaacaacacaggtca

SEQ ID NO: 538 - DNA, 526 bp, Homo sapiens; identical to SEQ ID NO: 311

SEQ ID NO: 539 - DNA, 3360 bp, Homo sapiens
gaattccggctgtgccgcaccgaggcgagcaggagcagggaacaggtgtttaaaattatccaactgccatagagctaaattcttttttggaaaattgaaccgaacttctactgaatacaagatgaaaatgtggttgctggtcagtcatcttgtgataatatctattactacctgtttagcagagtttacatggtatagaagatatggtcatggagtttctgaggaagacaaaggatttggaccaatttttgaagagcagccaatcaataccatttatccagaggaatcactggaaggaaaagtctcactcaactgtagggcacgagccagccctttcccggtttacaaatggagaatgaataatggggacgttgatctcacaagtgatcgatacagtatggtaggaggaaaccttgttatcaacaaccctgacaaacagaaagatgctggaatatactactgtttagcatctaataactacgggatggtcagaagcactgaagcaaccctgagctttggatatcttgatcctttcccacctgaggaacgtcctgaggtcagagtaaaagaagggaaaggaatggtgcttctctgtgaccccccataccattttccagatgatcttagctatcgctggcttctaaatgaatttcctgtatttatcacaatggataaacggcgatttgtgtctcagacaaatggcaatctctacattgcaaatgttgaggcttccgacaaaggcaattattcctgctttgtttccagtccttctattacaaagagcgtgttcagcaaattcatcccactcattccaatacctgaacgaacaacaaaaccatatcctgctgatattgtagttcagttcaaggatgtatatgcattgatgggccaaaatgtgaccttagaatgttttgcacttggaaatcctgttccggatatccgatggcggaaggttctagaaccaatgccaagcactgctgagattagcacctctggggctgttcttaagatcttcaatattcagctagaagatgaaggcatctatgaatgtgaggctgagaacattagaggaaaggataaacatcaagcaagaatttatgttcaagcattccctgagtgggtagaacacatcaatgacacagaggtggacataggcagtgatctctactggccttgtgtggccacaggaaagcccatccctacaatccgatggttgaaaaatggatatgcgtatcataaaggggaattaagactgtatgatgtgacttttgaaaatgccggaatgtatcagtgcatagctgaaaacacatatggagccatttatgcaaatgctgagttgaagatcttggcgttggctccaacttttgaaatgaatcctatgaagaaaaagatcctggctgctaaaggtggaagggtgataattgaatgcaaacctaaagctgcaccgaaaccaaagttttcatggagtaaagggacagagtggcttgtcaatagcagcagaatactcatttgggaagatggtagcttggaaatcaacaacattacaaggaatgatggaggtatctatacatgctttgcagaaaataacagagggaaagctaatagcactggaacccttgttatcacagatcctacgcgaattatattggccccaattaatgccgatatcacagttggagaaaacgccaccatgcagtgtgctgcgtcctttgatcctgccttggatctcacatttgtttggtccttcaatggctatgtgatcgattttaacaaagagaatattcactaccagaggaattttatgctggattccaatggggaattactaatccgaaatgcgcagctgaaacatgctggaagatacacatgcactgcccagacaattgtggacaattcttcagcttcagctgaccttgtagtgagaggccctccaggccctccaggtggtctgagaatagaagacattagagccacttctgtggcacttacttggagccgtggttcagacaatcatagtcctatttctaaatacactatccagaccaagactattctttcagatgactggaaagatgcaaagacagatcccccaattattgaaggaaatatggaggcagcaagagcagtggacttaatcccatggatggagtatgaattccgcgtggtagcaaccaatacactgggtagaggagagcccagtataccatctaacagaattaaaacagacggtgctgcaccaaatgtggctccttcagatgtaggaggtggaggtggaagaaacagagagctgaccataacatgggcgcctttgtcaagagaataccactatggcaacaattttggttacatagtggcatttaagccatttgatggagaagaatggaaaaaagtcacagttactaatcctgatactggccgatatgtccataaagatgaaaccatgagcccttccactgcatttcaagttaaagtcaaggccttcaacaacaaaggagatggaccttacagcctactagcagtcattaattcagcacaagacgctcccagtgaagccccaacagaagtaggtgtaaaagtcttatcatcttctgagatatctgttcattgggaacatgttttagaaaaaatagtggaaagctatcagattcggtattgggctgcccatgacaaagaagaagctgcaaacagagttcaagtcaccagccaagagtactcggccaggctcgagaaccttctgccagacacccagtattttatagaagtcggggcctgcaatagtgcagggtgtggacctccaagtgacatgattgaggctttcaccaagaaagcacctcctagccagcctccaaggatcatcagttcagtaaggtctggttcacgctatataatcacctgggatcatgtcgttgcactatcaaatgaatctacagtgacgggatataaggtactctacagacctgatggccagcatgatggcaagctgtattcaactcacaaacactccatagaagtcccaatccccagagatggagaatacgttgtggaggttcgcgcgcacagtgatggaggagatggagtggtgtctcaagtcaaaatttcaggtgcacccaccctatccccaagtcttctcggcttactgctgcctgcctttggcatccttgtctacttggaattctgaatgtgttgtgacagctgctgttcccatcccagctcagaagacacccttcaaccctgggatgaccacaattccttccaatttctgcggctccatcctaagccaaataaattatactttaacaaactattcaactgatttacaacacacatgatgactgaggcattcaggaaccccttcatcca

SEQ ID NO: 540 - DNA, 2711 bp, Homo sapiens
acacttcttcctggcaaagaagtgcccaggacgggagctggggagccagggctgatctaggaggctgggagccaggtgacaggatggccccaaagagagttgtgcagctgtccctgaagatgcctacccatgccgtgtgtgtggtgggagtcgaggcacatgtggacattcacagtgatgtgcccaagggtgccaacagcttcagggtctctggaagctccggggtggaggtcttcatggtctacaaccgcacacgtgtgaaagagcccataggcaaggcccgttggccgctagacactgatgcagacatggtcgtatctgtgggcacagccagtaaggaattaaaggacttcaaggtgagggtctcctactttggggagcaggaagaccaagctctgggccgcagcgtgctttacctcactggcgtcgatatttcccttgaggttgacacaggccgcacaggcaaggtgaagaggagccaaggggacaagaaaacctggcgctggggccctgagggctatggggctatcttgctggtgaactgtgaccgggacaatcacaggtccgcggagcctgacctcacccacagctggctgatgtcgctggctgacctgcaggacatgtccccaatgctgctgagctgcaatggccccgacaagctcttcgacagccacaagcttgtcttgaacgtgcccttttctgattccaaaagagtgagggtcttctgtgccaggggtgggaattctctctcggactacaaacaggtgctggggccccagtgtctgtcctatgaagttgagcgacagccaggggagcaggagatcaagttctatgtggaggggctgaccttccccgatgccgatttcctagggctggtttccctcagtgtcagcctggtggacccggggaccctgcccgaggtgaccctcttcacagacactgtgggcttccgcatggccccctggatcatgacgcccaacactcagcctcctgaggagctgtatgtgtgcagagtgatggacactcatggctccaatgagaaattcctggaggacatgtcttatctgacattgaaagccaactgcaagctgaccatctgccctcaagttgaaaatcgaaatgaccgctggatccaggacgagatggagtttggctacatcgaggcccctcacaaatccttccccgtggtctttgactcccccaggaacaggggcctgaaagatttcccctataagaggatcctgggtcctgactttggatatgttacccgggagatcccgctccctggtccctccagccttgactccttcggcaacctggacgtcagcccgcccgtcacggggggcggcacggaataccccctgggccggatcctcatcgggagcagcttccccaagtccggtgggcggcagatggccagggcagtgcggaacttcctgaaggcacagcaggtgcaggcacccgtggagctctactcggactggctctctgtgggccatgtggacgagtttctgacctttgtgcctacctctgaccagaagggcttccggctgctcctggctagccccagcgcttgccccaaactcttccaagagaagaaagaagagggttatggggaggcagcccagtttgatgggttaaaacaccaggcaaaaagaagcattaatgagatgctggcagacagacacctccagagagacaatcttcatgcacagaaatgcattgactggaaccgtaatgtgctgaagcgggagctgggcctggcagagagtgacatcgtggacattccccagctcttcttcctgaaaaacttctacgcggaagccttcttcccagacatggttaacatggtggtcttaggcaagtacctgggcatccccaagccctacgggcccatcatcaatggccgctgctgcctggaggagaaggtgcagtccctgctggagcctctgggcctgcactgcatcttcattgatgactacttgtcctaccacgagctgcagggggagatccactgtggcaccaacgtgcgcaggaagccctttcccttcaaatggtggaacatggtgccctgagcctgcccccacccgccatcctctctgccctcttgctagggaaccctgccagggtgaaggcaaggaacaaccacctggcctccattctcttgggggagtcttggcactttgcaaacatcctggccaccatgggcaccaggacacagggatggataccacctaccctcgcctctggaatggcctacccaacccgagaagaatgcacctcattcttccctggcctctttcccacccacagcccccagaggctctagatcaacaatgttagcatgttccagaatggctgtgggaggcctagggaggtgggccccacttagaattgctcccccttcattctgatgcctccctggggaacaaggataatgactttgcatctgcacctggaacggggcctgggggacctggggtctggtgtgccaggcaccaggctgcctctgctcttggaaaactaggaaaggggatcagaaacatcctctccccgctctaggtttcttctcccaaaggggacccaaggctgtgacacttacctccacccccatccagcacccttcagctgtgtgtggacaaacaaggacagaaaaacccagtgtccaagggccaatttaaatagaaaaaaaaaaaaaaaaaaaaaaaaaa

SEQ ID NO: 541 - DNA, 2437 bp, Homo sapiens
tcggatccactagtaacggccgccagtgtgctggaattcgcggccggtcgacccaccaccatgaggtcctgcctgtggagatgcaggcacctgagccaaggcgtccagtggtccttgcttctggctgtcctggtcttctttctcttcgccttgccctcttttattaaggagcctcaaacaaagccttccaggcatcaacgcacagagaacattaaagaaaggtctctacagtccctggcaaagcctaagtcccaggcacccacaagggcaaggaggacaaccatctatgcagagccagtgccagagaacaatgccctcaacacacaaacccagcccaaggcccacaccaccggagacagaggaaaggaggccaaccaggcaccgccggaggagcaggacaaggtgccccacacagcacagagggcagcatggaagagcccagaaaaagagaaaaccatggtgaacacactgtcacccagagggcaagatgcagggatggcctctggcaggacagaggcacaatcatggaagagccaggacacaaagacgacccaaggaaatgggggccagaccaggaagctgacggcctccaggacggtgtcagagaagcaccagggcaaagcggcaaccacagccaagacgctcattcccaaaagtcagcacagaatgctggctcccacaggagcagtgtcaacaaggacgagacagaaaggagtgaccacagcagtcatcccacctaaggagaagaaacctcaggccaccccaccccctgcccctttccagagccccacgacgcagagaaaccaaagactgaaggccgccaacttcaaatctgagcctcggtgggattttgaggaaaaatacagcttcgaaataggaggccttcagacgacttgccctgactctgtgaagatcaaagcctccaagtcgctgtggctccagaaactctttctgcccaacctcactctcttcctggactccagacacttcaaccagagtgagtgggaccgcctggaacactttgcaccaccctttggcttcatggagctcaactactccttggtgcagaaggtcgtgacacgcttccctccagtgccccagcagcagctgctcctggccagcctccccgctgggagcctccggtgcatcacctgtgccgtggtgggcaacgggggcatcctgaacaactcccacatgggccaggagatagacagtcacgactacgtgttccgattgagcggagctctcattaaaggctacgaacaggatgtggggactcggacatccttctacggctttaccgccttctccctgacccagtcactccttatattgggcaatcggggtttcaagaacgtgcctcttgggaaggacgtccgctacttgcacttcctggaaggcacccgggactatgagtggctggaagcactgcttatgaatcagacggtgatgtcaaaaaaccttttctggttcaggcacagaccccaggaagcttttcgggaagccctgcacatggacaggtacctgttgctgcacccagactttctccgatacatgaagaacaggtttctgaggtctaagaccctggatggtgcccactggaggatataccgccccaccactggggccctcctgctgctcactgcccttcagctctgtgaccaggtgagtgcttatggcttcatcactgagggccatgagcgcttttctgatcactactatgatacatcatggaagcggctgatcttttacataaaccatgacttcaagctggagagagaagtctggaagcggctacacgatgaagggataatccggctgtaccagcgtcctggtcccggaactgccaaagccaagaactgaccggggccagggctgccatggtctccttgcctgctccaaggcacaggatacagtgggaatcttgagactctttggccatttcccatggctcagactaagctccaagcccttcaggagttccaagggaacacttgaaccatggacaagactctctcaagatggcaaatggctaattgaggttctgaagttcttcagtacattgctgtaggtcctgaggccagggatttttaattaaatggggtgatgggtggccaataccacaattcctgctgaaaaacactcttccagtccaaaagcttcttgatacagaaaaaagagcctggatttacagaaacatatagatctggtttgaattccaggatcgagtttacagttgtgaaatcttgaaggtattacttaacttcactacagattgtctagaagacctttctaggagttatctgattctagaagggtctatacttgtccttgtctttaagctatttgacaactctacgtgttgtagaamactgataataatacaaatgattgttgtccatggaaaggcaaataaattttctacagtgaaaaaaaa

SEQ ID NO: 542 - DNA, 2789 bp, Homo sapiens; identical to SEQ ID NO: 447

SEQ ID NO: 543 - DNA, 506 bp, Homo sapiens
tttttgtaatgccatcaattttatttttgaaatgcaagggtgctacttcccccaggtaggtcaacagatgagtaacaagcaaaaaaaaaaacctctaggaaaagcaaaaagaggcagtcatgctacattcaagcatgctcatctgacagtgataataatacattgtgtatgcaccattctaattcccagtagaaaacttgttgctggtttataagatgcagttaaacatagacacttccagcctgggcaacatggcaaaaccccgtctcaaactcccgacctcgtgatccgcccgccttggccttccaaagtgctggaattacagggatgagccactgtgccgggccaaagcagaattttaaatcagcaattgggatacaatattagtgcagataatttacactagagtcatatttatatctgtcccagtattaagtataccacatatgtatggactgttagaagaaattcatttcatttttaaagcagtggattgtttagtaagt

SEQ ID NO: 544 - DNA, 1628 bp, Homo sapiens; identical to SEQ ID NO: 449

SEQ ID NO: 545 - DNA, 1316 bp, Homo sapiens; identical to SEQ ID NO: 425

SEQ ID NO: 546 - DNA, 535 bp, Homo sapiens
  misc_feature (8)..(8): "n" = a, t, g, or c.
acttttantaaattttatttacaaaaacagatagtgagctatatttggcccacaggcagtggtaattcactgacccttgctataaaggcttgataaattttattagtattattaatacaatgacttacaaataatctttaatacttaacaaagcaatatattttttaaccaagaactaagtatatacctcatttacaattattttaaaacaaatttgcttatgggagcaatgaaaaaaaaaatcttgcctgtaaattctggtgtaacttaattgaattttaaagaaaaagttttaactacagagactgactgacattccattgttctacgtccctgagggagaagtaccttaattgaattttaaagaaaaagttttaactacagagactgactgacattccattgttctacgtccctgagggagaagtacaggccaaaatgaagagcaatgttcacaaaggcttggtagaaataagaggagaaatttgctggaatcttcaacatctctgacctttgttctctcttggaagggctt

SEQ ID NO: 547 - DNA, 527 bp, Homo sapiens
  misc_feature (228)..(228): "n" = a, t, g, or c.
tttttttttggagctgcatgggtatttcattgaaagttcacagacacaagggctctgagcggggtcacatcgtggaggaggcagggtcggggagcacagagtgagtcctcccaacctgggacaattttgcataagcccttcctgctaggtgtcaggtccaaggggccccaggagcctgggaaggggcacgtgagggcagggacacagacgctggaagccaaggtgcancagcgaggggagaagcccccaggccccagacacaggcagggtggaggccaggaggcggagggggtggactgagggccaagctcactgcccccttgctgtactcagcttctgatggccttgctgcccagttcacagctcaagggggccccaggacaagaagccctgccctgccccaacctcatgggatcctgcgtttcagggaccatgagaataaacatgtctcagtgcttgtctccgccagcagccgtgcctggcgggccttagtagtcggtgagggggtaccgcaggaagatgaagac

SEQ ID NO: 548 - protein, 1170 aa, Homo sapiens
MGLAWGLGVLFLMHVCGTNRIPESGGDNSVFDIFELTGAARKGSGRRLVKGPDPSSPAFRIEDANLIPPVPDDKFQDLVDAVRAEKGFLLLASLRQMKKTRGTLLALERKDHSGQVFSVVSNGKAGTLDLSLTVQGKQHVVSVEEALLATGQWKSITLFVQEDRAQLYIDCEKMENAELDVPIQSVFTRDLASIARLRIAKGGVNDNFQGVLQNVRFVFGTTPEDILRNKGCSSSTSVLLTLDNNVVNGSSPAIRTNYIGHKTKDLQAICGISCDELSSMVLELRGLRTIVTTLQDSIRKVTEENKELANELRRPPLCYHNGVQYRNNEEWTVDSCTECHCQNSVTICKKVSCPIMPCSNATVPDGECCPRCWPSDSADDGWSPWSEWTSCSTSCGNGIQQRGRSCDSLNNRCEGSSVQTRTCHIQECDKRFKQDGGWSHWSPWSSCSVTCGDGVITRIRLCNSPSPQMNGKPCEGEARETKACKKDACPINGGWGPWSPWDICSVTCGGGVQKRSRLCNNPAPQFGGKDCVGDVTENQICNKQDCPIDGCLSNPCFAGVKCTSYPDGSWKCGACPPGYSGNGIQCTDVDECKEVPDACFNHNGEHRCENTDPGYNCLPCPPRFTGSQPFGQGVEHATANKQVCKPRNPCTDGTHDCNKNAKCNYLGHYSDPMYRCECKPGYAGNGIICGEDTDLDGWPNENLVCVANATYHCKKDNCPNLPNSGQEDYDKDGIGDACDDDDDNDKIPDDRDNCPFHYNPAQYDYDRDDVGDRCDNCPYNHNPDQADTDNNGEGDACAADIDGDGILNERDNCQYVYNVDQRDTDMDGVGDQCDNCPLEHNPDQLDSDSDRIGDTCDNNQDIDEDGHQNNLDNCPYVPNANQADHDKDGKGDACDHDDDNDGIPDDKDNCRLVPNPDQKDSDGDGRGDACKDDFDHDSVPDIDDICPENVDISETDFRRFQMIPLDPKGTSQNDPNWVVRHQGKELVQTVNCDPGLAVGYDEFNAVDFSGTFFINTERDDDYAGFVFGYQSSSRFYVVMWKQVTQSYWDTNPTRAQGYSGLSVKVVNSTTGPGEHLRNALWHTGNTPGQVRTLWHDPRHIGWKDFTAYRWRLSHRPKTGFIRVVMYEGKKIMADSGPIYDKTYAGGRLGLFVFSQEMVFFSDLKYECRDP

SEQ ID NO: 549 - protein, 836 aa, Homo sapiens
MIPFLPMFSLLLLLIVNPINANNHYDKILAHSRIRGRDQGPNVCALQQILGTKKKYFSTCKNWYKKSICGQKTTVLYECCPGYMRMEGMKGCPAVLPIDHVYGTLGIVGATTTQRYSDASKLREEIEGKGSFTYFAPSNEAWDNLDSDIRRGLESNVNVELLNALHSHMINKRMLTKDLKNGMIIPSMYNNLGLFINHYPNGVVTVNCARIIHGNQIATNGVVHVIDRVLTQIGTSIQDFIEAEDDLSSFRAAAITSDILEALGRDGHFTLFAPTNEAFEKLPRGVLERFMGDKVASEALMKYHILNTLQCSESIMGGAVFETLEGNTIEIGCDGDSITVNGIKMVNKKDIVTNNGVIHLIDQVLIPDSAKQVIELAGKQQTTFTDLVAQLGLASALRPDGEYTLLAPVNNAFSDDTLSMVQRLLKLILQNHILKVKVGLNELYNGQILETIGGKQLRVFVYRTAVCIENSCMEKGSKQGRNGAIHIFREIIKPAEKSLHEKLKQDKRFSTFLSLLEAADLKELLTQPGDWTLFVPTNDAFKGMTSEEKEILIRDKNALQNIILYHLTPGVFIGKGFEPGVTNILKTTQGSKIFLKEVNDTLLVNELKSKESDIMTTNGVIHVVDKLLYPADTPVGNDQLLEILNKLIKYIQIKFVRGSTFKEIPVTVYTTKIITKVVEPKIKVIEGSLQPIIKTEGPTLTKVKIEGEPEFRLIKEGETITEVIHGEPIIKKYTKIIDGVPVEITEKETREERIITGPEIKYTRISTGGGETEETLKKLLQEEVTKVTKFIEGGDGHLFEDEEIKRLLQGDTPVRKLQANKKVQGSRRRLREGRSQ

SEQ ID NO: 550 - protein, 790 aa, Homo sapiens
MRTYRYFLLLFWVGQPYPTLSTPLSKRTSGFPAKKRALELSGNSKNELNRSKRSWMWNQFFLLEEYTGSDYQYVGKLHSDQDRGDGSLKYILSGDGAGDLFIINENTGDIQATKRLDREEKPVYILRAQAINRRTGRPVEPESEFIIKIHDINDNEPIFTKEVYTATVPEMSDVGTFVVQVTATDADDPTYGNSAKVVYSILQGQPYFSVESETGIIKTALLNMDRENREQYQVVIQAKDMGGQMGGLSGTTTVNITLTDVNDNPPRFPQSTYQFKTPESSPPGTPIGRIKASDADVGENAEIEYSITDGEGLDMFDVITDQETQEGIITVKKLLDFEKKKVYTLKVEASNPYVEPRFLYLGPFKDSATVRIVVEDVDEPPVFSKLAYILQIREDAQINTTIGSVTAQDPDAARNPVKYSVDRHTDMDRIFNIDSGNGSIFTSKLLDRETLLWHNITVIATEINNPKQSSRVPLYIKVLDVNDNAPEFAEFYETFVCEKAKADQLIQTLHAVDKDDPYSGHQFSFSLAPEAASGSNFTIQDNKDNTAGILTRKNGYNRHEMSTYLLPVVISDNDYPVQSSTGTVTVRVCACDHHGNMQSCHAEALIHPTGLSTGALVAILLCIVILLVTVVLFAALRRQRKKEPLIISKEDIRDNIVSYNDEGGGEEDTQAFDIGTLRNPEAIEDNKLRRDIVPEALFLPRRTPTARDNTDVRDFINQRLKENDTDPTAPPYDSLATYAYEGTGSVADSLSSLESVTTDADQDYDYLSDWGPRFKKLADMYGGVDSDKDS

SEQ ID NO: 551 - protein, 532 aa, Homo sapiens
MAPSSPRPALPALLVLLGALFPGPGNAQTSVSPSKVILPRGGSVLVTCSTSCDQPKLLGIETPLPKKELLLPGNNRKVYELSNVQEDSQPMCYSNCPDGQSTAKTFLTVYWTPERVELAPLPSWQPVGKNLTLRCQVEGGAPRANLTVVLLRGEKELKREPAVGEPAEVTTTVLVRRDHHGANFSCRTELDLRPQGLELFENTSAPYQLQTFVLPATPPQLVSPRVLEVDTQGTVVCSLDGLFPVSEAQVHLALGDQRLNPTVTYGNDSFSAKASVSVTAEDEGTQRLTCAVILGNQSQETLQTVTIYSFPAPNVILTKPEVSEGTEVTVKCEAHPRAKVTLNGVPAQPLGPRAQLLLKATPEDNGRSFSCSATLEVAGQLIHKNQTRELRVLYGPRLDERDCPGNWTWPENSQQTPMCQAWGNPLPELKCLKDGTFPLPIGESVTVTRDLEGTYLCRARSTQGEVTREVTVNVLSPRYEIVIITVVAAAVIMGTAGLSTYLYNRQRKIKKYRLQQAQKGTPMKPNTQATPP

SEQ ID NO: 552 - protein, 244 aa, Homo sapiens
MKERRASQKLSSKSIMDPNQNVKCKIVVVGDSQCGKTALLHVFAKDCFPENYVPTVFENYTASFEIDTQRIELSLWDTSGSPYYDNVRPLSYPDSDAVLICFDISRPETLDSVLKKWKGEIQEFCPNTKMLLVGCKSDLRTDVSTLVELSNHRQTPVSYDQGANMAKQIGAATYIECSALQSENSVRDIFHVATLACVNKTNKNVKRNKSQRATKRISHMPSRPELSAVATDLRKDKAKSCTVM

SEQ ID NO: 553 - protein, 234 aa, Homo sapiens
MCFPKVLSDDMKKLKARMVMLLPTSAQGLGAWVSACDTEDTVGHLGPWRDKDPALWCQLCLSSQHQAIERFYDKMQNAESGRGQVMSSLAELEDDFKEGYLETVAAYYEEQHPELTPLLEKERDGLRCRGNRSPVPDVEDPATEEPGESFCDKVMRWFQAMLQRLQTWWHGVLAWVKEKVVALVHAVQALWKQFQSFCCSLSELFMSSFQSYGAPRGDKEELTPQKCSEPQSSK

SEQ ID NO: 554 - protein, 292 aa, Homo sapiens
MELLCCEGTRHAPRAGPDPRLLGDQRVLQSLLRLEERYVPRASYFQCVQREIKPHMRKMLAYWMLEVCEEQRCEEEVFPLAMNYLDRYLSCVPTRKAQLQLLGAVCMLLASKLRETTPLTIEKLCIYTDHAVSPRQLRDWEVLVLGKLKWDLAAVIAHDFLAFILHRLSLPRDRQALVKKHAQTFLALCATDYTFAMYPPSMIATGSIGAAVQGLGACSMSGDELTELLAGITGTEVDCLRACQEQIEAALRESLREASQTSSSPAPKAPRGSSSQGPSQTSTPTDVTAIHL

SEQ ID NO: 555 - protein, 94 aa, Homo sapiens
MSVKGMAIALAVILCATVVQGFPMFKRGRCLCIGPGVKAVKVADIEKASIMYPSNNCDKIEVIITLKENKGQRCLNPKSKQARLIIKKVERKNF

SEQ ID NO: 556 - protein, 98 aa, Homo sapiens
MNQTAILICCLIFLTLSGIQGVPLSRTVRCTCISISNQPVNPRSLEKLEIIPASQFCPRVEIIATMKKKGEKRCLNPESKAIKNLLKAVSKEMSKRSP

SEQ ID NO: 557 - protein, 380 aa, Homo sapiens
MAFVCLAIGCLYTFLISTTFGCTSSSDTEIKVNPPQDFEIVDPGYLGYLYLQWQPPLSLDHFKECTVEYELKYRNIGSETWKTIITKNLHYKDGFDLNKGIEAKIHTLLPWQCTNGSEVQSSWAETTYWISPQGIPETKVQDMDCVYYNWQYLLCSWKPGIGVLLDTNYNLFYWYEGLDHALQCVDYIKADGQNIGCRFPYLEASDYKDFYICVNGSSENKPIRSSYFTFQLQNIVKPLPPVYLTFTRESSCEIKLKWSIPLGPIPARCFDYEIEIREDDTTLVTATVENETYTLKTTNETRQLCFVVRSKVNIYCSDDGIWSEWSDKQCWEGEDLSKKTLLRFWLPFGFILILVIFVTGLLLRKPNTYPKMIPEFFCDT

SEQ ID NO: 558 - protein, 414 aa, Homo sapiens
MHYCVLSAFLILHLVTVALSLSTCSTLDMDQFMRKRIEAIRGQILSKLKLTSPPEDYPEPEEVPPEVISIYNSTRDLLQEKASRRAAACERERSDEEYYAKEVYKIDMPPFFPSENAIPPTFYRPYFRIVRFDVSAMEKNASNLVKAEFRVFRLQNPKARVPEQRIELYQILKSKDLTSPTQRYIDSKVVKTRAEGEWLSFDVTDAVHEWLHHKDRNLGFKISLHCPCCTFVPSNNYIIPNKSEELEARFAGIDGTSTYTSGDQKTIKSTRKKNSGKTPHLLLMLLPSYRLESQQTNRRKKRALDAAYCFRNVQDNCCLRPLYIDFKRDLGWKWIHEPKGYNANFCAGACPYLWSSDTQHSRVLSLYNTINPEASASPCCVSQDLEPLTILYYIGKTPKIEQLSNMIVKSCKCS

SEQ ID NO: 559 - protein, 397 aa, Homo sapiens
MVKETTYYDVLGVKPNATQEELKKAYRKLALKYHPDKNPNEGEKFKQISQAYEVLSDAKKRELYDKGGEQAIKEGGAGGGFGSPMDIFDMFFGGGGRMQRERRGKNVVHQLSVTLEDLYNGATRKLALQKNVICDKCEGRGGKKGAVECCPNCRGTGMQIRIHQIGPGMVQQIQSVCMECQGHGERISPKDRCKSCNGRKIVREKKILEVHIDKGMKDGQKITFHGEGDQEPGLEPGDIIIVLDQKDHAVFTRRGEDLFMCMDIQLVEALCGFQKPISTLDNRTIVITSHPGQIVKHGDIKCVLNEGMPIYRRPYEKGRLIIEFKVNFPENGFLSPDKLSLLEKLLPERKEVEETDEMDQVELVDFDPNQERRRHYNGEAYEDDEHHPRGGVQCQTS

SEQ ID NO: 560 - protein, 159 aa, Homo sapiens
MTLEEVRGQDTVPESTARMQGAGKALHELLLSAQRQGCLTAGVYESAKVLNVDPDNVTFCVLAAGEEDEGDIALQIHFTLIQAFCCENDIDIVRVGDVQRLAAIVGAGEEAGAPGDLHCILISNPNEDAWKDPALEKLSLFCEESRSVNDWVPSITLPE

SEQ ID NO: 561 - protein, 1153 aa, Homo sapiens [sequence omitted]

SEQ ID NO: 562 - protein, 395 aa, Homo sapiens
MNGQLNGFHEAFIEEGTFLFTSESVGEGHPDKICDQISDAVLDAHLQQDPDAKVACETVAKTGMILLAGEITSRAAVDYQKVVREAVKHIGYDDSSKGFDYKTCNVLVALEQQSPDIAQGVHLDRNEEDIGAGDQGLMFGYATDETEECMPLTIVLAHKLNAKLAELRRNGTLPWLRPDSKTQVTVQYMQDRGAVLPIRVHTIVISVQHDEEVCLDEMRDALKEKVIKAVVPAKYLDEDTIYHLQPSGRFVIGGPQGDAGLTGRKIIVDTYGGWGAHGGGAFSGKDYTKVDRSAAYAARWVAKSLVKGGLCRRVLVQVSYAIGVSHPLSISIFHYGTSQKSERELLEIVKKNFDLRPGVIVRDLDLKKPIYQRTAAYGHFGRDSFPWEVPKKLKY

SEQ ID NO: 563 - protein, 318 aa, Homo sapiens
MDKQNSQMNASHPETNLPVGYPPQYPPTAFQGPPGYSGYPGPQVSYPPPPAGHSGPGPAGFPVPNQPVYNQPVYNQPVGAAGVPWMPAPQPPLNCPPGLEYLSQIDQILIHQQIELLEVLTGFETNNKYEIKNSFGQRVYFAAEDTDCCTRNCCGPSRPFTLRIIDNMGQEVITLERPLRCSSCCCPCCLQEIEIQAPPGVPIGYVIQTWHPCLPKFTIQNEKREDVLKISGPCVVCSCCGDVDFEIKSLDEQCVVGKISKHWTGILREAFTDADNFGIQFPLDLDVKMKAVMIGACFLIDFMFFESTGSQEQKSGVW

SEQ ID NO: 564 - protein, 737 aa, Homo sapiens
MGGCTVKPQLLLLALVLHPWNPCLGADSEKPSSIPTDKLLVITVATKESDGFHRFMQSAKYFNYTVKVLGQGEEWRGGDGINSIGGGQKVRLMKEVMEHYADQDDLVVMFTECFDVIFAGGPEEVLKKFQKANHKVVFAADGILWPDKRLADKYPVVHIGKRYLNSGGFIGYAPYVNRIVQQWNLQDNDDDQLFYTKVYIDPLKREAINITLDHKCKIFQTLNGAVDEVVLKFENGKARAKNTFYETLPVAINGNGPTKILLNYFGNYVPNSWTQDNGCTLCEFDTVDLSAVDVHPNVSIGVFIEQPTPFLPRFLDILLTLDYPKEALKLFIHNKEVYHEKDIKVFFDKAKHEIKTIKIVGPEENLSQAEARNMGMDFCRQDEKCDYYFSVDADVVLTNPRTLKILIEQNRKIIAPLVTRHGKLWSNFWGALSPDGYYARSEDYVDIVQGNRVGVWNVPYMANVYLIKGKTLRSEMNERNYFVRDKLDPDMALCRNAREMGVFMYISNRHEFGRLLSTANYNTSHYNNDLWQIFENPVDWKEKYINRDYSKIFTENIVEQPCPDVFWFPIFSEKACDELVEEMEHYGKWSGGKHHDSRISGGYENVPTDDIHMKQVDLENVWLDFIREFIAPVTLKVFAGYYTKGFALLNFVVKYSPERQRSLRPHHDASTFTINIALNNVGEDFQGGGCKFLRYNCSIESPRKGWSFMHPGRLTHLHEGLPVKNGTRYIAVSFIDP

SEQ ID NO: 565 - protein, 766 aa, Homo sapiens
MKTPWKVLLGLLGAAALVTIITVPVVLLNKGTDDATADSRKTYTLTDYLKNTYRLKLYSLRWISDHEYLYKQENNILVFNAEYGNSSVFLENSTFDEFGHSINDYSISPDGQFILLEYNYVKQWRHSYTASYDIYDLNKRQLITEERIPNNTQWVTWSPVGHKLAYVWNNDIYVKIEPNLPSYRITWTGKEDIIYNGITDWVYEEEVFSAYSALWWSPNGTFLAYAQFNDTEVPLIEYSFYSDESLQYPKTVRVPYPKAGAVNPTVKFFVVNTDSLSSVTNATSIQITAPASMLIGDHYLCDVTWATQERISLQWLRRIQNYSVMDICDYDESSGRWNCLVARQHIEMSTTGWVGRFRPSEPHFTLDGNSFYKIISNEEGYRHICYFQIDKKDCTFITKGTWEVIGIEALTSDYLYYISNEYKGMPGGRNLYKIQLSDYTKVTCLSCELNPERCQYYSVSFSKEAKYYQLRCSGPGLPLYTLHSSVNDKGLRVLEDNSALDKMLQNVQMPSKKLDFIILNETKFWYQMILPPHFDKSKKYPLLLDVYAGPCSQKADTVFRLNWATYLASTENIIVASFDGRGSGYQGDKIMHAINRRLGTFEVEDQIEAARQFSKMGFVDNKRIAIWGWSYGGYVTSMVLGSGSGVFKCGIAVAPVSRWEYYDSVYTERYMGLPTPEDNLDHYRNSTVMSRAENFKQVEYLLIHGTADDNVHFQQSAQISKALVDVGVDFQAMWYTDEDHGIASSTAHQHIYTHMSHFIKQCFSLP

SEQ ID NO: 566 - protein, 338 aa, Homo sapiens [sequence omitted]

SEQ ID NO: 567 - protein, 590 aa, Homo sapiens
MHSMISSVDVKSEVPVGLEPISPLDLRTDLRMMMPVVDPVVREKQLQQELLLIQQQQQIQKQLLIAEFQKQHENLTRQHQAQLQEHIKELLAIKQQQELLEKEQKLEQQRQEQEVERHRREQQLPPLRGKDRGRERAVASTEVKQKLQEFLLSKSATKDTPTNGKNHSVSRHPKLWYTAAHHTSLDQSSPPLSGTSPSYKYTLPGAQDAKDDFPLRKTASEPNLKVRSRLKQKVAERRSSPLLRRKDGNVVTSFKKRMFEVTESSVSSSSPGSGPSSPNNGPTGSVTENETSVLPPTPHAEQMVSQQRILIHEDSMNLLSLYTSPSLPNITLGLPAVPSQLNASNSLKEKQKCETQTLRQGVPLPGQYGGSIPASSSHPHVTLEGKPPNSSHQALLQHLLLKEQMRQQKLLVAGGVPLHPQSPLATKERISPGIRGTHKLPRHRPLNRTQSAPLPQSTLAQLVIQQQHQQFLEKQKQYQQQIHMNKLLSKSIEQLKQPGSHLEEAEEELQGDQAMQEDRAPSSGNSTRSDSSACVDDTLGQVGAVKVKEEPVDSDEDAQIQEMESGEQAAFMQQVIGKDLAPGFVIKVII

SEQ ID NO: 568 - protein, 1011 aa, Homo sapiens
MHSMISSVDVKSEVPVGLEPISPLDLRTDLRMMMPVVDPVVREKQLQQELLLIQQQQQIQKQLLIAEFQKQHENLTRQHQAQLQEHIKELLAIKQQQELLEKEQKLEQQRQEQEVERHRREQQLPPLRGKDRGRERAVASTEVKQKLQEFLLSKSATKDTPTNGKNHSVSRHPKLWYTAAHHTSLDQSSPPLSGTSPSYKYTLPGAQDAKDDFPLRKTASEPNLKVRSRLKQKVAERRSSPLLRRKDGNVVTSFKKRMFEVTESSVSSSSPGSGPSSPNNGPTGSVTENETSVLPPTPHAEQMVSQQRILIHEDSMNLLSLYTSPSLPNITLGLPAVPSQLNASNSLKEKQKCETQTLRQGVPLPGQYGGSIPASSSHPHVTLEGKPPNSSHQALLQHLLLKEQMRQQKLLVAGGVPLHPQSPLATKERISPGIRGTHKLPRHRPLNRTQSAPLPQSTLAQLVIQQQHQQFLEKQKQYQQQIHMNKLLSKSIEQLKQPGSHLEEAEEELQGDQAMQEDRAPSSGNSTRSDSSACVDDTLGQVGAVKVKEEPVDSDEDAQIQEMESGEQAAFMQQPFLEPTHTRALSVRQAPLAAVGMDGLEKHRLVSRTHSSPAASVLPHPAMDRPLQPGSATGIAYDPLMLKHQCVCGNSTTHPEHAGRIQSIWSRLQETGLLNKCERIQGRKASLEEIQLVHSEHHSLLYGTNPLDGQKLDPRILLGDDSQKFFSSLPCGGLGVDSDTIWNELHSSGAARMAVGCVIELASKVASGELKNGFAVVRPPGHHAEESTAMGFCFFNSVAITAKYLRDQLNISKILIVDLDVHHGNGTQQAFYADPSILYISLHRYDEGNFFPGSGAPNEVGTGLGEGYNINIAWTGGLDPPMGDVEYLEAFRTIVKPVAKEFDPDMVLVSAGFDALEGHTPPLGGYKVTAKCFGHLTKQLMTLADGRVVLALEGGHDLTAICDASEACVNALLGNELEPLAEDILHQSPNMNAVISLQKIIEIQSMSLKFS

SEQ ID NO: 569 - protein, 879 aa, Homo sapiens
MHSMISSVDVKSEVPVGLEPISPLDLRTDLRMMMPVVDPVVREKQLQQELLLIQQQQQIQKQLLIAEFQKQHENLTRQHQAQLQEHIKELLAIKQQQELLEKEQKLEQQRQEQEVERHRREQQLPPLRGKDRGRERAVASTEVKQKLQEFLLSKSATKDTPTNGKNHSVSRHPKLWYTAAHHTSLDQSSPPLSGTSPSYKYTLPGAQDAKDDFPLRKTASEPNLKVRSRLKQKVAERRSSPLLRRKDGNVVTSFKKRMFEVTESSVSSSSPGSGPSSPNNGPTGSVTENETSVLPPTPHAEQMVSQQRILIHEDSMNLLSLYTSPSLPNITLGLPAVPSQLNASNSLKEKQKCETQTLRQGVPLPGQYGGSIPASSSHPHVTLEGKPPNSSHQALLQHLLLKEQMRQQKLLVAGGVPLHPQSPLATKERISPGIRGTHKLPRHRPLNRTQSAPLPQSTLAQLVIQQQHQQFLEKQKQYQQQIHMNKLLSKSIEQLKQPGSHLEEAEEELQGDQAMQEDRAPSSGNSTRSDSSACVDDTLGQVGAVKVKEEPVDSDEDAQIQEMESGEQAAFMQQPFLEPTHTRALSVRQAPLAAVGMDGLEKHRLVSRTHSSPAASVLPHPAMDRPLQPGSATGIAYDPLMLKHQCVCGNSTTHPEHAGRIQSIWSRLQETGLLNKCERIQGRKASLEEIQLVHSEHHSLLYGTNPLDGQKLDPRILLGDDSQKFFSSLPCGGLGVDSDTIWNELHSSGAARMAVGCVIELASKVASGELKNGFAVVRPPGHHAEESTAMGFCFFNSVAITAKYLRDQLNISKILIVDLDVHHGNGTQQAFYADPSILYISLHRYDEGNFFPGSGAPNEVRFISLEPHFYLYLSGNCIA

SEQ ID NO: 570 - protein, 471 aa, Homo sapiens
MPNSEPASLLELFNSIATQGELVRSLKAGNASKDEIDSAVKMLVSLKMSYKAAAGEDYKADCPPGNPAPTSNHGPDATEAEEDFVDPWTVQTSSAKGIDYDKLIVRFGSSKIDKELINRIERATGQRPHHFLRRGIFFSHRDMNQVLDAYENKKPFYLYTGRGPSSEAMHVGHLIPFIFTKWLQDVFNVPLVIQMTDDEKYLWKDLTLDQAYGDAVENAKDIIACGFDINKTFIFSDLDYMGMSSGFYKNVVKIQKHVTFNQVKGIFGFTDSDCIGKISFPAIQAAPSFSNSFPQIFRDRTDIQCLIPCAIDQDPYFRMTRDVAPRIGYPKPALLHSTFFPALQGAQTKMSASDPNSSIFLTDTAKQIKTKVNKHAFSGGRDTIEEHRQFGGNCDVDVSFMYLTFFLEDDDKLEQIRKDYTSGAMLTGELKKALIEVLQPLIAEHQARRKEVTDEIVKEFMTPRKLSFDFQ

SEQ ID NO: 571 - protein, 387 aa, Homo sapiens
MSTFFSDTAWICLAVPTVLCGTVFCKYKKSSGQLWSWMVCLAGLCAVCLLILSPFWGLILFSVSCFLMYTYLSGQELLPVDQKAVLVTGGDCGLGHALCKYLDELGFTVFAGVLNENGPGAEELRRTCSPRLSVLQMDITKPVQIKDAYSKVAAMLQDRGLWAVINNAGVLGFPTDGELLLMTDYKQCMAVNFFGTVEVTKTFLPLLRKSKGRLVNVSSMGGGAPMERLASYGSSKAAVTMFSSVMRLELSKWGIKVASIQPGGFLTNIAGTSDKWEKLEKDILDHLPAEVQEDYGQDYILAQRNFLLLINSLASKDFSPVLRDIQHAILAKSPFAYYTPGKGAYLWICLAHYLPIGIYDYFAKRHFGQDKPMPRALRMPNYKKKAT

SEQ ID NO: 572 - protein, 1025 aa, Homo sapiens
MAPVLSKDSADIESILALNPRTQTHATLCSTSAKKLDKKHWKRNPDKNCFNCEKLENNFDDIKHTTLGERGALREAMRCLKCADAPCQKSCPTNLDIKSFITSIANKNYYGAAKMIFSDNPLGLTCGMVCPTSDLCVGGCNLYATEEGPINIGGLQQFATEVFKAMSIPQIRNPSLPPPEKMSEAYSAKIALFGAGPASISCASFLARLGYSDITIFEKQEYVGGLSTSEIPQFRLPYDVVNFEIELMKDLGVKIICGKSLSVNEMTLSTLKEKGYKAAFIGIGLPEPNKDAIFQGLTQDQGFYTSKDFLPLVAKGSKAGMCACHSPLPSIRGVVIVLGAGDTAFDCATSALRCGARRVFIVFRKGFVNIRAVPEEMELAKEEKCEFLPFLSPRKVIVKGGRIVAMQFVRTEQDETGKWNEDEDQMVHLKADVVISAFGSVLSDPKVKEALSPIKFNRWGLPEVDPETMQTSEAWVFAGGDVVGLANTTVESVNDGKQASWYIHKYVQSQYGASVSAKPELPLFYTPIDLVDISVEMAGLKFINPFGLASATPATSTSMIRRAFEAGWGFALTKTFSLDKDIVTNVSPRIIRGTTSGPMYGPGQSSFLNIELISEKTAAYWCQSVTELKADFPDNIVIASIMCSYNKNDWTELAKKSEDSGADALELNLSCPHGMGERGMGLACGQDPELVRNICRWVRQAVQIPFFAKLTPNVTDIVSIARAAKEGGANGVTATNTVSGLMGLKSDGTPWPAVGIAKRTTYGGVSGTAIRPIALRAVTSIARALPGFPILATGGIDSAESGLQFLHSGASVLQVCSAIQNQDFTVIEDYCTGLKALLYLKSIEELQDWDGQSPATVSHQKGKPVPRIAELMDKKLPSFGPYLEQRKKIIAENKIRLKEQNVAFSPLKRSCFIPKRPIPTIKDVIGKALQYLGTFGELSNVEQVVAMIDEEMCINCGKCYMTCNDSGYQAIQFDPETHLPTITDTCTGCTLCLSVCPIVDCIKMVSRTTPYEPKRGVPLSVNPVC

SEQ ID NO: 573 - protein, 219 aa, Homo sapiens
MLRAGAPTGDLPRAGEVHTGTTIMAVEFDGGVVMGSDSRVSAGEAVVNRVFDKLSPLHERIYCALSGSAADAQAVADMAAYQLELHGIELEEPPLVLAAANVVRNISYKYREDLSAHLMVAGWDQREGGQVYGTLGGMLTRQPFAIGGSGSTFIYGYVDAAYKPGMSPEECRRFTTDAIALAMSRDGSSGGVIYLVTITAAGVDHRVILGNELPKFYDE

SEQ ID NO: 574 - protein, 364 aa, Homo sapiens
MMDLRNTPAKSLDKFIEDYLLPDTCFRMQINHAIDIICGFLKERCFRGSSYPVCVSKVVKGGSSGKGTTLRGRSDADLVVFLSPLTTFQDQLNRRGEFIQEIRRQLEACQRERAFSVKFEVQAPRWGNPRALSFVLSSLQLGEGVEFDVLPAFDALGQLTGSYKPNPQIYVKLIEECTDLQKEGEFSTCFTELQRDFLKQRPTKLKSLIRLVKHWYQNCKKKLGKLPPQYALELLTVYAWERGSMKTHFNTAQGFRTVLELVINYQQLCIYWTKYYDFKNPIIEKYLRRQLTKPTPVILDPADPTGNLGGGDPKRWRQLAQEAEAWLNYPCFKNWDGSPVSSWILLVRPPASSLPFIPAPLHEA

SEQ ID NO: 575 - protein, 400 aa, Homo sapiens
MMDLRNTPAKSLDKFIEDYLLPDTCFRMQIDHAIDIICGFLKERCFRGSSYPVCVSKVVKGGSSGKGTTLRGRSDADLVVFLSPLTTFQDQLNRRGEFIQEIRRQLEACQRERALSVKFEVQAPRWGNPRALSFVLSSLQLGEGVEFDVLPAFDALGQLTGSYKPNPQIYVKLIEECTDLQKEGEFSTCFTELQRDFLKQRPTKLKSLIRLVKHWYQNCKKKLGKLPPQYALELLTVYAWERGSMKTHFNTAQGFRTVLELVINYQQLCIYWTKYYDFKNPIIEKYLRRQLTKPRPVILDPADPTGNLGGGDPKGWRQLAQEAEAWLNYPCFKNWDGSPVSSWILLAESNSTDDETDDPRTYQKYGYIGTHEYPHFSHRPSTLQAASTPQAEEDWTCTIL

SEQ ID NO: 576 - protein, 687 aa, Homo sapiens
MAEELVLERCDLELETNGRDHHTADLCREKLVVRRGQPFWLTLHFEGRNYQASVDSLTFSVVTGPAPSQEAGTKARFPLRDAVEEGDWTATVVDQQDCTLSLQLTTPANAPIGLYRLSLEASTGYQGSSFVLGHFILLFNAWCPADAVYLDSEEERQEYVLTQQGFIYQGSAKFIKNIPWNFGQFQDGILDICLILLDVNPKFLKNAGRDCSRRSSPVYVGRVGSGMVNCNDDQGVLLGRWDNNYGDGVSPMSWIGSVDILRRWKNHGCQRVKYGQCWVFAAVACTVLRCLGIPTRVVTNYNSAHDQNSNLLIEYFRNEFGEIQGDKSEMIWNFHCWVESWMTRPDLQPGYEGWQALDPTPQEKSEGTYCCGPVPVRAIKEGDLSTKYDAPFVFAEVNADVVDWIQQDDGSVHKSINRSLIVGLKISTKSVGRDEREDITHTYKYPEGSSEEREAFTRANHLNKLAEKEETGMAMRIRVGQSMNMGSDFDVFAHITNNTAEEYVCRLLLCARTVSYNGILGPECGTKYLLNLTLEPFSEKSVPLCILYEKYRDCLTESNLIKVRALLVEPVINSYLLAERDLYLENPEIKIRILGEPKQKRKLVAEVSLQNPLPVALEGCTFTVEGAGLTEEQKTVEIPDPVEAGEEVKVRMDLVPLHMGLHKLVVNFESDKLKAVKGFRNVIIGPA

SEQ ID NO: 577 - protein, 687 aa, Homo sapiens
MGNGESQLSSVPAQKLGWFIQEYLKPYEECQTLIDEMVNTICDVCRNPEQFPLVQGVAIGGSYGRKTVLRGNSDGTLVLFFSDLKQFQDQKRSQRDILDKTGDKLKFCLFTKWLKNNFEIQKSLDGSTIQVFTKNQRISFEVLAAFNALSLNDNPSPWIYRELKRSLDKTNASPGEFAVCFTELQQKFFDNRPGKLKDLILLIKHWHQQCQKKIKDLPSLSPYALELLTVYAWEQGCRKDNFDIAEGVRTVLELIKCQEKLCIYWMVNYNFEDETIRNILLHQLQSARPVILDPVDPTNNVSGDKICWQWLKKEAQTWLTSPNLDNELPAPSWNVLPAPLFTTPGHLLDKFIKEFLQPNKCFLEQIDSAVNIIRTFLKENCFRQSTAKIQIVRGGSTAKGTALKTGSDADLVVFHNSLKSYTSQKNERHKIVKEIHEQLKAFWREKEEELEVSFEPPKWKAPRVLSFSLKSKVLNESVSFDVLPAFNALGQLSSGSTPSPEVYAGLIDLYKSSDLPGGEFSTCFTVLQRNFIRSRPTKLKDLIRLVKHWYKECERKLKPKGSLPPKYALELLTIYAWEQGSGVPDFDTAEGFRTVLELVTQYQQLGIFWKVNYNFEDETVRKFLLSQLQKTRPVILDPGEPTGDVGGGDRWCWHLLDKEAKVRLSSPCFKDGTGNPIPPWKVPVKVI

SEQ ID NO: 578 - protein, 497 aa, Homo sapiens [sequence omitted]

SEQ ID NO: 579 - protein, 153 aa, Homo sapiens
MMASMRVVKELEDLQKKPPPYLRNLSSDDANVLVWHALLLPDQPPYHLKAFNLRISFPPEYPFKPPMIKFTTKIYHPNVDENGQICLPIISSENWKPCTKTCQVLEALNVLVNRPNIREPLRMDLADLLTQNPELFRKNAEEFTLRFGVDRPS

SEQ ID NO: 580 - protein, 406 aa, Homo sapiens
MIHTNLKKKFSCCVLVFLLFAVICVWKEKKKGSYYDSFKLQTKEFQVLKSLGKLAMGSDSQSVSSSSTQDPHRGRQTLGSLRGLAKAKPEASFQVWNKDSSSKNLIPRLQKIWKNYLSMNKYKVSYKGPGPGIKFSAEALRCHLRDHVNVSMVEVTDFPFNTSEWEGYLPKESIRTKAGPWGRCAVVSSAGSLKSSQLGREIDDHDAVLRFNGAPTANFQQDVGTKTTIRLMNSQLVTTEKRFLKDSLYNEGILIVWDPSVYHSDIPKWYQNPDYNFFNNYKTYRKLHPNQPFYILKPQMPWELWDILQEISPEEIQPNPPSSGMLGIIIMMTLCDQVDIYEFLPSKRKTDVCYYYQKFFDSACTMGAYHPLLYEKNLVKHLNQGTDEDIYLLGKATLPGFRTIHC

SEQ ID NO: 581 - protein, 307 aa, Homo sapiens
MAALLLGAVLLVAQPQLVPSRPAELGQQELLRKAGTLQDDVRDGVAPNGSAQQLPQTIIIGVRKGGTRALLEMLSLHPDVAAAENEVHFFDWEEHYSHGLGWYLSQMPFSWPHQLTVEKTPAYFTSPKVPERVYSMNPSIRLLLILRDPSERVLSDYTQVFYNHMQKHKPYPSIEEFLVRDGRLNVDYKALNRSLYHVHMQNWLRFFPLRHIHIVDGDRLIRDPFPEIQKVERFLKLSPQINASNFYFNKTKGFYCLRDSGRDRCLHESKGRAHPQVDPKLLNKLHEYFHEPNKKFFELVGRTFDWH

SEQ ID NO: 582 - protein, 428 aa, Homo sapiens
MEEAPTHFNSFLKKEGLTFNRKRKWELDSYPIMLWWSPLTGETGRLGQCGADACFFTINRTYLHHHMTKAFLFYGTDFNIDSLPLPRKAHHDWAVFHEESPKNNYKLFHKPVITLFNYTATFSRHSHLPLTTQYLESIEVLKSLRYLVPLQSKNKLRKRLAPLVYVQSDCDPPSDRDSYVRELMTYIEVDSYGECLRNKDLPQQLKNPASMDADGFYRIIAQYKFILAFENAVCDDYITEKFWRPLKLGVVPVYYGSPSITDWLPSNKSAILVSEFSHPRELASYIRRLDSDDRLYEAYVEWKLKGEISNQRLLTAVRERKWGVQDVNQDNYIDAFECMVCTKVWANIRLQEKGLPPKRWEAEDTHLSCPEPTVFAFSPLRTPPLSSLREMWISSFEQSKKEAQALRWLVDRNQNFSSQEFWGLVFKD

SEQ ID NO: 583 - protein, 661 aa, Homo sapiens
MEGAAAPVAGDRPDLGLGAPGSPREAVAGATAALEPRKPHGVKRHHHKHNLKHRYELQETLGKGTYGKVKRATERFSGRVVAIKSIRKDKIKDEQDMVHIRREIEIMSSLNHPHIISIYEVFENKDKIVIIMEYASKGELYDYISERRRLSERETRHFFRQIVSAVHYCHKNGVVHRDLKLENILLDDNCNIKIADFGLSNLYQKDKFLQTFCGSPLYASPEIVNGRPYRGPEVDSWALGVLLYTLVYGTMPFDGFDHKNLIRQISSGEYREPTQPSDARGLIRWMLMVNPDRRATIEDIANHWWVNWGYKSSVCDCDALHDSESPLLARIIDWHHRSTGLQADTEAKMKGLAKPTTSEVMLERQRSLKKSKKENDFAQSGQDAVPESPSKLSSKRPKGILKKRSNSEHRSHSTGFIEGVVGPALPSTFKMEQDLCRTGVLLPSSPEAEVPGKLSPKQSATMPKKGILKKTQQRESGYYSSPERSESSELLDSNDVMGSSIPSPSPPDPARVTSHSLSCRRKGILKHSSKYSAGTMDPALVSPEMPTLESLSEPGVPAEGLSRSYSRPSSVISDDSVLSSDSFDLLDLQENRPARQRIRSCVSAENFLQIQDFEGLQNRPRPQYLKRYRNRLADSSFSLLTDMDDVTQVYKQALEICSKLN

SEQ ID NO: 584 - protein, 626 aa, Homo sapiens
MQRADSEQPSKRPRCDDSPRTPSNTPSAEADWSPGLELHPDYKTWGPEQVCSFLRRGGFEEPVLLKNIRENEITGALLPCLDESRFENLGVSSLGERKKLLSYIQRLVQIHVDTMKVINDPIHGHIELHPLLVRIIDTPQFQRLRYIKQLGGGYYVFPGASHNRFEHSLGVGYLAGCLVHALGEKQPELQISERDVLCVQIAGLCHDLGHGPFSHMFDGRFIPLARPEVKWTHEQGSVMMFEHLINSNGIKPVMEQYGLIPEEDICFIKEQIVGPLESPVEDSLWPYKGRPENKSFLYEIVSNKRNGIDVDKWDYFARDCHHLGIQNNFDYKRFIKFARVCEVDNELRICARDKEVGNLYDMFHTRNSLHRRAYQHKVGNIIDTMITDAFLKAGDYIEITGAGGKKYRISTAIDDMEAYTKLTDNIFLEILYSTDPKLKDAREILKQIEYRNLFKYVGETQPTGQIKIKREDYESLPKEVASAKPKVLLDVKLEAEDFIVDVINMDYGMQEKNPIDHVSFYCKTAPNRAIRITKNQVSQLLPEKFAEQLIRVYCKKVDRKSLYAARQYFVQWCADRNFTKPQDGDVIAPLITPQKKEWNDSTSVQNPTRLREASKSRVQLFKDDPM

SEQ ID NO: 585 - protein, 413 aa, Homo sapiens
MVERCSRQGCTITMAYIDYNMIVAFMLGNYINLRESSTEPNDSLWFSLQKKNDTTEIETLLLNTAPKIIDEQLVCRLSKTDIFIICRDNKIYLDKMITRNLKLRFYGHRQYLECEVFRVEGIKDNLDDIKRIIKAREHRNRLLADIRDYRPYADLVSEIRILLVGPVGSGKSSFFNSVKSIFHGHVTGQAVVGSDTTSITERYRIYSVKDGKNGKSLPFMLCDTMGLDGAEGAGLCMDDIPHILKGCMPDRYQFNSRKPITPEHSTFITSPSLKDRIHCVAYVLDINSIDNLYSKMLAKVKQVHKEVLNCGIAYVALLTKVDDCSEVLQDNFLNMSRSMTSQSRVMNVHKMLGIPISNILMVGNYASDLELDPMKDILILSALRQMLRAADDFLEDLPLEETGAIERALQPCI

SEQ ID NO: 586 - protein, 539 aa, Homo sapiens
MERPAPLAVLPFSDPAHALSLLRGLSQLRAERKFLDVTLEAAGGRDFPAHRAVLAAASPYFRAMFAGQLRESRAERVRLHGVPPDMLQLLLDFSYTGRVAVSGDNAEPLLRAADLLQFPAVKEACGAFLQQQLDLANCLDMQDFAEAFSCSGLASAAQRFILRHVGELGAEQLERLPLARLLRYLRDDGLCVPKEEAAYQLALRWVRADPPRRAAHWPQLLEAVRLPFVRRFYLLAHVEAEPLVARCPPCLRLLREARDFQAARYDRHDRGPCPRMRPRPSTGLAEILVLVGGCDQDCDELVTVDCYNPQTGQWRYLAEFPDHLGGGYSIVALGNDIYVTGGSDGSRLYDCVWRYNSSVNEWAEVAPMLKAREYHSSSVLDGLLYVVAADSTERYDHTTDSWEALQPMTYPMDNCSTTACRGRLYAIGSLAGKETMVMQCYDPDTDLWSLVDCGQLPPWSFAPKTATLNGLMYFVRDDSAEVDVYNPTRNEWDKIPSMNQVNFQAGQHWKHRLVLILQPKCHRDECLGSTAMMDGSHLN

SEQ ID NO: 587 - protein, 244 aa, Homo sapiens
MVYKTLFALCILTAGWRVQSLPTSAPLSVSLPTNIVPPTTIWTSSPQNTDADTASPSNGTHNNSVLPVTASAPTSLLPKNISIESREEEITSPGSNWEGTNTDPSPSGFSSTSGGVHLTTTLEEHSLGTPEAGVAATLSQSAAEPPTLISPQAPASSPSSLSTSPPEVFSASVTTNHSSTVTSTQPTGAPTAPESPTEESSSDHTPTSHATAEPVPQEKTPPTTVSGKVMCELIDMETPPPFPG

SEQ ID NO: 588 - protein, 165 aa, Homo sapiens
MGWDLTVKMLAGNEFQVSLSSSMSVSELKAQITQKIGVHAFQQRLAVHPSGVALQDRVPLASQGLGPGSTVLLVVDKCDEPLSILVRNNKGRSSTYEVRLTQTVAHLKQQVSGLEGVQDDLFWLTFEGKPLEDQLPLGEYGLKPLSTVFMNLRLRGGGTEPGGRS

SEQ ID NO: 589 - protein, 478 aa, Homo sapiens
MSTNGDDHQVKDSLEQLRCHFTWELSIDDDEMPDLENRVLDQIEFLDTKYSVGIHNLLAYVKHLKGQNEEALKSLKEAENLMQEEHDNQANVRSLVTWGNFAWMYYHMGRLAEAQTYLDKVENICKKLSNPFRYRMECPEIDCEEGWALLKCGGKNYERAKACFEKVLEVDPENPESSAGYAISAYRLDGFKLATKNHKPFSLLPLRQAVRLNPDNGYIKVLLALKLQDEGQEAEGEKYIEEALANMSSQTYVFRYAAKFYRRKGSVDKALELLKKALQETPTSVLLHHQIGLCYKAQMIQIKEATKGQPRGQNREKLDKMIRSAIFHFESAVEKKPTFEVAHLDLARMYIEAGNHRKAEENFQKLLCMKPVVEETMQDIHFYYGRFQEFQKKSDVNAIIHYLKAIKIEQASLTRDKSINSLKKLVLRKLRRKALDLESLSLLGFVYKLEGNMNEALEYYERALRLAADFENSVRQGP

SEQ ID NO: 590 - protein, 181 aa, Homo sapiens
MAGSREVVAMDCEMVGLGPHRESGLARCSLVNVHGAVLYDKFIRPEGEITDYRTRVSGVTPQHMVGATPFAVARLEILQLLKGKLVVGHDLKHDFQALKEDMSGYTIYDTSTDRLLWREAKLDHCRRVSLRVLSERLLHKSIQNSLLGHSSVEDARATMELYQISQRIRARRGLPRLAVSD

SEQ ID NO: 591 - protein, 361 aa, Homo sapiens
MWVLTPAAFAGKLLSVFRQPLSSLWRSLVPLFCWLRATFWLLATKRRKQQLVLRGPDETKEEEEDPPLPTTPTSVNYHFTRQCNYKCGFCFHTAKTSFVLPLEEAKRGLLLLKEAGMEKINFSGGEPFLQDRGEYLGKLVRFCKVELRLPSVSIVSNGSLIRERWFQNYGEYLDILAISCDSFDEEVNVLIGRGQGKKNHVENLQKLRRWCRDYRVAFKINSVINRFNVEEDMTEQIKALNPVRWKVFQCLLIEGENCGEDALREAERFVIGDEEFERFLERHKEVSCLVPESNQKMKDSYLILDEYMRFLNCRKGRKDPSKSILDVGVEEAIKFSGFDEKMFLKRGGKYIWSKADLKLDW

SEQ ID NO: 592 - protein, 490 aa, Homo sapiens
MSEVTKNSLEKILPQLKCHFTWNLFKEDSVSRDLEDRVCNQIEFLNTEFKATMYNLLAYIKHLDGNNEAALECLRQAEELIQQEHADQAEIRSLVTWGNYAWVYYHLGRLSDAQIYVDKVKQTCKKFSNPYSIEYSELDCEEGWTQLKCGRNERAKVCFEKALEEKPNNPEFSSGLAIAMYHLDNHPEKQFSTDVLKQAIELSPDNQYVKVLLGLKLQKMNKEAEGEQFVEEALEKSPCQTDVLRSAAKFYRRKGDLDKAIELFQRVLESTPNNGYLYHQIGCCYKAKVRQMQNTGESEASGNKEMIEALKQYAMDYSNKALEKGLNPLNAYSDLAEFLETECYQTPFNKEVPDAEKQQQSHQRYCNLQKYNGKSEDTAVQHGLEGLSISKKSTDKEEIKDQPQNVSENLLPQNAPNYWYLQGLIHKQNGDLLQAKCYEKELGRLLRDAPSGIGSIFLSASELEDGSEEMGQGAVSSSPRELLSNSEQLN

SEQ ID NO: 593 - protein, 328 aa, Homo sapiens
MGFWILAILTILMYSTAAKFSKQSWGLENEALIVRCPRQGKPSYTVDWYYSQTNKSIPTQERNRVFASGQLLKFLPAEVADSGIYTCIVRSPTFNRTGYANVTIYKKQSDCNVPDYLMYSTVSGSEKNSKIYCPTIDLYNWTAPLEWFKNCQALQGSRYRAHKSFLVIDNVMTEDAGDYTCKFIHNENGANYSVTATRSFTVKDEQGFSLFPVIGAPAQNEIKEVEIGKNANLTCSACFGKGTQFLAAVLWQLNGTKITDFGEPRIQQEEGQNQSFSNGLACLDMVLRIADVKEEDLLLQYDCLALNLHGLRRHTVRLSRKNPSKECF

SEQ ID NO: 594 - protein, 556 aa, Homo sapiens
MGFWILAILTILMYSTAAKFSKQSWGLENEALIVRCPRQGKPSYTVDWYYSQTNKSIPTQERNRVFASGQLLKFLPAEVADSGIYTCIVRSPTFNRTGYANVTIYKKQSDCNVPDYLMYSTVSGSEKNSKIYCPTIDLYNWTAPLEWFKNCQALQGSRYRAHKSFLVIDNVMTEDAGDYTCKFIHNENGANYSVTATRSFTVKDEQGFSLFPVIGAPAQNEIKEVEIGKNANLTCSACFGKGTQFLAAVLWQLNGTKITDFGEPRIQQEEGQNQSFSNGLACLDMVLRIADVKEEDLLLQYDCLALNLHGLRRHTVRLSRKNPIDHHSIYCIIAVCSVFLMLINVLVIILKMFWIEATLLWRDIAKPYKTRNDGKLYDAYVVYPRNYKSSTDGASRVEHFVHQILPDVLENKCGYTLCIYGRDMLPGEDVVTAVETNIRKSRRHIFILTPQITHNKEFAYEQEVALHCALIQNDAKVILIEMEALSELDMLQAEALQDSLQHLMKVQGTIKWREDHIANKRSLNSKFWKHVRYQMPVPSKIPRKASSLTPLAAQKQ

SEQ ID NO: 595 - protein, 122 aa, Homo sapiens
MEASALTSSAVTSVAKVVRVASGSAVVLPLARIATVVIGGVVAMAAVPMVLSAMGFTAAGIASSSIAAKMMSAAAIANGGGVASGSLVGTLQSLGATGLSGLTKFILGSIGSAIAAVIARFY

SEQ ID NO: 596 - protein, 299 aa, Homo sapiens
VSPTGCRPPRPSGGAGQTALHALQEEQARLKMRLWDLQQLRKELGDSPKDKVPFSVPKIPLVFRGHTQQDPEVPKSLVSNLRIHCPLLAGSALITFDDPKVAEQVLQQKEHTINMEECRLRVQVQPLELPMVTTIQVMVSSQLSGRRVLVTGFPASLRLSEEELLDKLEIFFGKTRNGGGDVDVRELLPGSVMLGFARDGVAQRLCQIGQFTVPLGGQQVPLRVSPYVNGEIQKAEIRSQPVPRSVLVLNIPDILDGPELHDVLEIHFQKPTRGGGEVEALTVVPQGQQGLAVFTSESG

SEQ ID NO: 597 - protein, 125 aa, Homo sapiens
MHKEEHEVAVLGAPPSTILPRSTVINIHSETSVPDHVVWSLFNTLFLNWCCLGFIAFAYSVKSRDRKMVGDVTGAQAYASTAKCLNIWALILGILMTIGFILLLVFGSVTVYHIMLQIIQEKRGY

SEQ ID NO: 598 - protein, 130 aa, Homo sapiens
MRQKAVSLFLCYLLLFTCSGVEAGKKKCSESSDSGSGFWKALTFMAVGGGLAVAGLPALGFTGAGIAANSVAASLMSWSAILNGGGVPAGGLVATLQSLGAGGSSVVIGNIGALMGYATHKYLDSEEDEE

SEQ ID NO: 599 - protein, 134 aa, Homo sapiens
MRQKAVSLFLCYLLLFTCSGVEAGENAGKKKCSESSDSGSGFWKALTFMAVGGGLAVAGLPALGFTGAGIAANSVAASLMSWSAILNGGGVPAGGLVATLQSLGAGGSSVVIGNIGALMGYATHKYLDSEEDEE

SEQ ID NO: 600 - protein, 138 aa, Homo sapiens
MRQKAVSLFLCYLLLFTCSGVEAGENAGKDAGKKKCSESSDSGSGFWKALTFMAVGGGLAVAGLPALGFTGAGIAANSVAASLMSWSAILNGGGVPAGGLVATLQSLGAGGSSVVIGNIGALMGYATHKYLDSEEDEE

SEQ ID NO: 601 - protein, 444 aa, Homo sapiens
MAVTTRLTRLHEKILQNHFGGKRLSLLYKGSVHGFRNGVLLDRCCNQGPTLTVIYSEDHIIGAYAEESYQEGKYASIILFALQDTKISEWKLGLCTPETLFCCDVTKYNSPTNFQIDGRNRKVIMDLKTMENLGLAQNCTISIQDYEVFRCEDSLDERKIKGVIELRKSLLSALRTYEPYGSLVQQIRILLLGPIGAGKSSFFNSVRSVFQGHVTHQALVGTNTTGISEKYRTYSIRDGKDGKYLPFILCDSLGLSEKEGGLCRDDIFYILNGNIRDRYQFNPMESIKLNHHDYIDSPSLKDRIHCVAFVFDASSIQYFSSQMIVKIKRIRRELVNAGVVHVALLTHVDSMDLITKGDLIEIERCEPVRSKLEEVQRKLGFALSDISVVSNYSSEWELDPVKDVLILSALRRMLWAADDFLEDLPFEQIGNLREEIINCAQGKK

SEQ ID NO: 602 - protein, 303 aa, Homo sapiens
MDSRHTFAPAAMTLSPLLLFLPPLLLLLDVPTAAVQASPLQALDFFGNGPPVNYKTGNLYLRGPLKKSNAPLVNVTLYYEALCGGCRAFLIRELFPTWLLVMEILNVTSVPYGNAQEQNVSGRWEFKCQLGEEECKFNKVEACVLDELDMELAFLTMSGMAWKSLRTWREVCHYACSSTPQGCRQNYHGVCNGGPRHAAHARQRPADRCSPATARVCALGHRQWETLGRSDPAPYPCLPVVPGQEAGCLPFLNQLPPECLLRVLAGGLRRAHGRRVGTRLPAFFSDPDPRHLLLTNWKILCIP

SEQ ID NO: 603 - protein, 525 aa, Homo sapiens [sequence omitted]

SEQ ID NO: 604 - protein, 1103 aa, Homo sapiens
MAEAELHKERLQAIAEKRKRQTEIEGKRQQLDEQILLLQHSKSKVLREKWLLQGIPAGTAEEEEARRRQSEEDEFRVKQLEDNIQRLEQEIQTLESEESQISAKEQIILEKLKETEKSFKDFQKGFSSTDGDAVNYISSQLPDLPILCSRTAEPSPGQDGTSRAAGVGWENVLLKEGESASNATETSGPDMTIKKPPQLSEDDIWLKSEGDNYSATLLEPAASSLSPDHKNMEIEVSVAECKSVPGITSTPHPMDHPSAFYSPPHNGLLTDHHESLDNDVAREIRYLDEVLEANCCDSAVDGTYNGTSSPEPGAVVLVGGLSPPVHEATQPEPTERTASRQAPPHIELSNSSPDPMAEAERTNGHSPSQPRDALGDSLQVPVSPSSTTSSRCSSRDGEFTLTTLKKEAKFELRAFHEDKKPSKLFEDDEHEKEQYCIRKVRPSEEMLELEKERRELIRSQAVKKNPGIAAKWWNPPQEKTIEEQLDEEHLESHKKYKERKERRAQQEQLLLQKQLQQQQQQPPSQLCTAPASSHERASMIDKAKEDIVTEQIDFSAARKQFQLMENSRQAVAKGQSTPRLFSIKPFYRPLGSVNSDKPLTNPRPPSVGGPPEDSGASAAKGQKSPGALETPSAAGSQGNTASQGKEGPYSEPSKRGPLSKLWAEDGEFTSARAVLTVVKDDDHGILDQFSRSVNVSLTQEELDSGLDELSVRSQDTTVLETLSNDFSMDNISDSGASNETTNALQENSLADFSLPQTPQTDNPSEGRGEGVSKSFSDHGFYSPSSTLGDSPLVDDPLEYQAGLLVQNAIQQAIAEQVDKAVSKTSRDGAEQQGPEATVEEAEAAAFGSEKPQSMFEPPQVSSPVQEKRDVLPKILPAEDRALRERGPPQPLPAVQPSGPINMEETRPEGSYFSKYSEAAELRSTASLLATQESDVMVGPFKLRSRKQRTLSMIEEEIRAAQEREEELKRQRQVLQSTQSPRTKNAPSLPSRTCYKTAPGKIEKVKPPPSPTTEGPSLQPDLAPEEAAGTQRPKNLMQTLMEDYETHKSKRRERMDDSSYTSKLLSCKVTSEVLEATRVNRRKSALALRWEAGIYANQEEEDNE

SEQ ID NO: 605 - protein, 662 aa, Homo sapiens
MRGAGPSPRQSPRTLRPDPGPAMSFFRRKVKGKEQEKTSDVKSIKASISVHSPQKSTKNHALLEAAGPSHVAINAISANMDSFSSSRTATLKKQPSHMEAAHFGDLGRSCLDYQTQETKSSLSKTLEQVLHDTIVLPYFIQFMELRRMEHLVKFWLEAESFHSTTWSRIRAHSLNTVKQSSLAEPVSPSKKHETTASFLTDSLDKRLEDSGSAQLFMTHSEGIDLNNRTNSTQNHLLLSQECDSAHSLRLEMARAGTHQVSMETQESSSTLTVASRNSPASPLKELSGKLMKSIEQDAVNTFTKYISPDAAKPIPITEAMRNDIIARICGEDGQVDPNCFVLAQSIVFSAMEQEHFSEFLRSHHFCKYQIEVLTSGTVYLADILFCESALFYFSEYMEKEDAVNILQFWLAADNFQSQLAAKKGQYDGQEAQNDAMILYDKYFSLQATHPLGFDDVVRLEIESNICREGGPLPNCFTTPLRQAWTTMEKVFLPGFLSSNLYYKYLNDLIHSVRGDEFLGGNVSLTAPGSVGPPDESHPGSSDSSASQSSVKKASIKILKNFDEAIIVDAASLDPESLYQRTYAGKMTFGRVSDLGQFIRESEPEPDVRKSKGSMFSQAMKKWVQGNTDEAQEELAWKIAKMIVSDIMQQAQYDQPLEKSTKL

SEQ ID NO: 606 - protein, 796 aa, Homo sapiens
MLRGGRRGQLGWHSWAAGPGSLLAWLILASAGAAPCPDACCPHGSSGLRCTRDGALDSLHHLPGAENLTELYIENQQHLQHLELRDLRGLGELRNLTIVKSGLRFVAPDAFHFTPRLSRLNLSFNALESLSWKTVQGLSLQELVLSGNPLHCSCALRWLQRWEEEGLGGVPEQKLQCHGQGPLAHMPNASCGVPTLKVQVPNASVDVGDDVLLRCQVEGRGLEQAGWILTELEQSATVMKSGGLPSLGLTLANVTSDLNRKNVTCWAENDVGRAEVSVQVNVSFPASVQLHTAVEMHHWCIPFSVDGQPAPSLRWLFNGSVLNETSFIFTEFLEPAANETVRHGCLRLNQPTHVNNGNYTLLAANPFGQASASIMAAFMDNPFEFNPEDPIPVSFSPVDTNSTSGDPVEKKDETPFGVSVAVGLAVFACLFLSTLLLVLNKCGRRNKFGINRPAVLAPEDGLAMSLHFMTLGGSSLSPTEGKGSGLQGHIIENPQYFSDACVHHIKRRDIVLKWELGEGAFGKVFLAECHNLLPEQDKMLVAVKALKEASESARQDFQREAELLTMLQHQHIVRFFGVCTEGRPLLMVFEYMRHGDLNRFLRSHGPDAKLLAGGEDVAPGPLGLGQLLAVASQVAAGMVYLAGLHFVHRDLATRNCLVGQGLVVKIGDFGMSRDIYSTDYYRVGGRTMLPIRWMPPESILYRKFTTESDVWSFGVVLWEIFTYGKQPWYQLSNTEAIDCITQGRELERPRACPPEVYAIMRGCWQREPQQRHSIKDVHARLQALAQAPPVYLDVLG

SEQ ID NO: 607 - protein, 968 aa, Homo sapiens
MVNSSRVQPQQPGDAKRPPAPRAPDPGRLMAGCAAVGASLAAPGGLCEQRGLEIEMQRIRQAAARDPPAGAAASPSPPLSSCSRQAWSRDNPGFEAEEEEEEVEGEEGGMVVEMDVEWRPGSRRSAASSAVSSVGARSRGLGGYHGAGHPSGRRRRREDQGPPCPSPVGGGDPLHRHLPLEGQPPRVAWAERLVRGLRGLWGTRLMEESSTNREKYLKSVLRELVTYLLFLIVLCILTYGMMSSNVYYYTRMMSQLFLDTPVSKTEKTNFKTLSSMEDFWKFTEGSLLDGLYWKMQPSNQTEADNRSFIFYENLLLGVPRIRQLRVRNGSCSIPQDLRDEIKECYDVYSVSSEDRAPFGPRNGTAWIYTSEKDLNGSSHWGIIATYSGAGYYLDLSRTREETAAQVASLKKNVWLDRGTRATFIDFSVYNANINLFCVVRLLVEFPATGGVIPSWQFQPLKLIRYVTTFDFFLAACEIIFCFFIFYYVVEEILEIRIHKLHYFRSFWNCLDVVIVVLSVVAIGINIYRTSNVEVLLQFLEDQNTFPNFEHLAYWQIQFNNIAAVTVFFVWIKLFKFINFNRTMSQLSTTMSRCAKDLFGFAIMFFIIFLAYAQLAYLVFGTQVDDFSTFQECIFTQFRIILGDINFAEIEEANRVLGPIYFTTFVFFMFFILLNMFLAIINDTYSEVKSDLAQQKAEMELSDLIRKGYHKALVKLKLKKNTVDDISESLRQGGGKLNFDELRQDLKGKGHTDAEIEAIFTKYDQDGDQELTEHEHQQMRDDLEKEREDLDLDHSSLPRPMSSRSFPRSLDDSEEDDDEDSGHSSRRRGSISSGVSYEEFQVLVRRVDRMEHSIGSIVSKIDAVIVKLEIMERAKLKRREVLGRLLDGVAEDERLGRDSEIHREQMERLVREELERWESDDAASQISHGLGTPVGLNGQPRPRSSRPSSSQSTEGMEGAGGNGSSNVHV

SEQ ID NO: 608 - protein, 885 aa, Homo sapiens
MAWRCPRMGRVPLAWCLALCGWACMAPRGTQAEESPFVGNPGNITGARGLTGTLRCQLQVQGEPPEVHWLRDGQILELADSTQTQVPLGEDEQDDWIVVSQLRITSLQLSDTGQYQCLVFLGHQTFVSQPGYVGLEGLPYFLEEPEDRTVAANTPFNLSCQAQGPPEPVDLLWLQDAVPLATAPGHGPQRSLHVPGLNKTSSFSCEAHNAKGVTTSRTATITVLPQQPRNLHLVSRQPTELEVAWTPGLSGIYPLTHCTLQAVLSDDGMGIQAGEPDPPEEPLTSQASVPPHQLRLGSLHPHTPYHIRVACTSSQGPSSWTHWLPVETPEGVPLGPPENISATRNGSQAFVHWQEPRAPLQGTLLGYRLAYQGQDTPEVLMDIGLRQEVTLELQGDGSVSNLTVCVAAYTAAGDGPWSLPVPLEAWRPVKEPSTPAFSWPWWYVLLGAVVAAACVLILALFLVHRRKKETRYGEVFEPTVERGELVVRYRVRKSYSRRTTEATLNSLGISEELKEKLRDVMVDRHKVALGKTLGEGEFGAVMEGQLNQDDSILKVAVKTMKIAICTRSELEDFLSEAVCMKEFDHPNVMRLIGVCFQGSERESFPAPVVILPFMKHGDLHSFLLYSRLGDQPVYLPTQMLVKFMADIASGMEYLSTKRFIHRDLAARNCMLNENMSVCVADFGLSKKIYNGDYYRQGRIAKMPVKWIAIESLADRVYTSKSDVWSFGVTMWEIATRGQTPYPGVENSEIYDYLRQGNRLKQPADCLDGLYALMSRCWELNPQDRPSFTELREDLENTLKALPPAQEPDEILYVNMDEGGGYPEPPGAAGGADPPTQPDPKDSCSCLTAAEVHPAGRYVLCPSTTPSPAQPADRGSPAAPGQEDGA

SEQ ID NO: 609 - protein, 894 aa, Homo sapiens
MAWRCPRMGRVPLAWCLALCGWACMAPRGTQAEESPFVGNPGNITGARGLTGTLRCQLQVQGEPPEVHWLRDGQILELADSTQTQVPLGEDEQDDWIVVSQLRITSLQLSDTGQYQCLVFLGHQTFVSQPGYVGLEGLPYFLEEPEDRTVAANTPFNLSCQAQGPPEPVDLLWLQDAVPLATAPGHGPQRSLHVPGLNKTSSFSCEAHNAKGVTTSRTATITVLPQQPRNLHLVSRQPTELEVAWTPGLSGIYPLTHCTLQAVLSDDGMGIQAGEPDPPEEPLTSQASVPPHQLRLGSLHPHTPYHIRVACTSSQGPSSWTHWLPVETPEGVPLGPPENISATRNGSQAFVHWQEPRAPLQGTLLGYRLAYQGQDTPEVLMDIGLRQEVTLELQGDGSVSNLTVCVAAYTAAGDGPWSLPVPLEAWRPGQAQPVHQLVKEPSTPAFSWPWWYVLLGAVVAAACVLILALFLVHRRKKETRYGEVFEPTVERGELVVRYRVRKSYSRRTTEATLNSLGISEELKEKLRDVMVDRHKVALGKTLGEGEFGAVMEGQLNQDDSILKVAVKTMKIAICTRSELEDFLSEAVCMKEFDHPNVMRLIGVCFQGSERESFPAPVVILPFMKHGDLHSFLLYSRLGDQPVYLPTQMLVKFMADIASGMEYLSTKRFIHRDLAARNCMLNENMSVCVADFGLSKKIYNGDYYRQGRIAKMPVKWIAIESLADRVYTSKSDVWSFGVTMWEIATRGQTPYPGVENSEIYDYLRQGNRLKQPADCLDGLYALMSRCWELNPQDRPSFTELREDLENTLKALPPAQEPDEILYVNMDEGGGYPEPPGAAGGADPPTQPDPKDSCSCLTAAEVHPAGRYVLCPSTTPSPAQPADRGSPAAPGQEDGA

SEQ ID NO: 610 - protein, 1408 aa, Homo sapiens
MKAPAVLAPGILVLLFTLVQRSNGECKEALAKSEMNVNMKYQLPNFTAETPIQNVILHEHHIFLGATNYIYVLNEEDLQKVAEYKTGPVLEHPDCFPCQDCSSKANLSGGVWKDNINMALVVDTYYDDQLISCGSVNRGTCQRHVFPHNHTADIQSEVHCIFSPQIEEPSQCPDCVVSALGAKVLSSVKDRFINFFVGNTINSSYFPDHPLHSISVRRLKETKDGFMFLTDQSYIDVLPEFRDSYPIKYVHAFESNNFIYFLTVQRETLDAQTFHTRIIRFCSINSGLHSYMEMPLECILTEKRKKRSTKKEVFNILQAAYVSKPGAQLARQIGASLNDDILFGVFAQSKPDSAEPMDRSAMCAFPIKYVNDFFNKIVNKNNVRCLQHFYGPNHEHCFNRTLLRNSSGCEARRDEYRTEFTTALQRVDLFMGQFSEVLLTSISTFIKGDLTIANLGTSEGRFMQVVVSRSGPSTPHVNFLLDSHPVSPEVIVEHTLNQNGYTLVITGKKITKIPLNGLGCRHFQSCSQCLSAPPFVQCGWCHDKCVRSEECLSGTWTQQICLPAIYKVFPNSAPLEGGTRLTICGWDFGFRRNNKFDLKKTRVLLGNESCTLTLSESTMNTLKCTVGPAMNKHFNMSIIISNGHGTTQYSTFSYVDPVITSISPKYGPMAGGTLLTLTGNYLNSGNSRHISIGGKTCTLKSVSNSILECYTPAQTISTEFAVKLKIDLANRETSIFSYREDPIVYEIHPTKSFISTWWKEPLNIVSFLFCFASGGSTITGVGKNLNSVSVPRMVINVHEAGRNFTVACQHRSNSEIICCTTPSLQQLNLQLPLKTKAFFMLDGILSKYFDLIYVHNPVFKPFEKPVMISMGNENVLEIKGNDIDPEAVKGEVLKVGNKSCENIHLHSEAVLCTVPNDLLKLNSELNIEWKQAISSTVLGKVIVQPDQNFTGLIAGVVSISTALLLLLGFFLWLKKRKQIKDLGSELVRYDARVHTPHLDRLVSARSVSPTTEMVSNESVDYRATFPEDQFPNSSQNGSCRQVQYPLTDMSPILTSGDSDISSPLLQNTVHIDLSALNPELVQAVQHVVIGPSSLIVHFNEVIGRGHFGCVYHGTLLDNDGKKIHCAVKSLNRITDIGEVSQFLTEGIIMKDFSHPNVLSLLGICLRSEGSPLVVLPYMKHGDLRNFIRNETHNPTVKDLIGFGLQVAKAMKYLASKKFVHRDLAARNCMLDEKFTVKVADFGLARDMYDKEYYSVHNKTGAKLPVKWMALESLQTQKFTTKSDVWSFGVVLWELMTRGAPPYPDVNTFDITVYLLQGRRLLQPEYCPDPLYEVMLKCWHPKAEMRPSFSELVSRISAIFSTFIGEHYVHVNATYVNVKCVAPYPSLLSSEDNADDEVDTRPASFWETS

SEQ ID NO: 611 - protein, 114 aa, Homo sapiens
MSALSLLILGLLTAVPPASCQQGLGNLQPWMQGLIAVAVFLVLVAIAFAVNHFWCQEEPEPAHMILTVGNKADGVLVGTDGRYSSMAASFRSSEHENAYENVPEEEGKVRSTPM

SEQ ID NO: 612 - protein, 209 aa, Homo sapiens
MASMGLQVMGIALAVLGWLAVMLCCALPMWRVTAFIGSNIVTSQTIWEGLWMNCVVQSTGQMQCKVYDSLLALPQDLQAARALVIISIIVAALGVLLSVVGGKCTNCLEDESAKAKTMIVAGVVFLLAGLMVIVPVSWTAHNIIQDFYNPLVASGQKREMGASLYVGWAASGLLLLGGGLLCCNCPPRTDKPYSAKYSAARSAAASNYV

SEQ ID NO: 613 - protein, 357 aa, Homo sapiens
MAPRRVRSFLRGLPALLLLLLFLGPWPAASHGGKYSREKNQPKPSPKRESGEEFRMEKLNQLWEKAQRLHLPPVRLAELHADLKIQERDELAWKKLKLDGLDEDGEKEARLIRNLNVILAKYGLDGKKDARQVTSNSLSGTQEDGLDDPRLEKLWHKAKTSGKFSGEELDKLWREFLHHKEKVHEYNVLLETLSRTEEIHENVISPSDLSDIKGSVLHSRHTELKEKLRSINQGLDRLRRVSHQGYSTEAEFEEPRVIDLWDLAQSANLTDKELEAFREELKHFEAKIEKHNHYQKQLEIAHEKLRHAESVGDGERVSRSREKHALLEGRTKELGYTVKKHLQDLSGRISRARHNEL

SEQ ID NO: 614 - protein, 416 aa, Homo sapiens
MPRQLSAAAALFASLAVILHDGSQMRAKAFPETRDYSQPTAAATVQDIKKPVQQPAKQAPHQTLAARFMDGHITFQTAATVKIPTTTPATTKNTATTSPITYTLVTTQATPNNSHTAPPVTEVTVGPSLAPYSLPPTITPPAHTAGTSSSTVSHTTGNTTQPSNQTTLPATLSIALHKSTTGQKPDQPTHAPGTTAAAHNTTRTAAPASTVPGPTLAPQPSSVKTGIYQVLNGSRLCIKAEMGIQLIVQDKESVFSPRRYFNIDPNATQASGNCGTRKSNLLLNFQGGFVNLTFTKDEESYYISEVGAYLTVSDPETVYQGIKHAVVMFQTAVGHSFKCVSEQSLQLSAHLQVKTTDVQLQAFDFEDDHFGNVDECSSDYTIVLPVIGAIVVGLCLMGMGVYKIRLRCQSSGYQRI

SEQ ID NO: 615 - protein, 218 aa, Homo sapiens
MGSAALEILGLVLCLVGWGGLILACGLPMWQVTAFLDHNIVTAQTTWKGLWMSCVVQSTGHMQCKVYDSVLALSTEVQAARALTVSAVLLAFVALFVTLAGAQCTTCVAPGPAKARVALTGGVLYLFCGLLALVPLCWFANIVVREFYDPSVPVSQKYELGAALYIGWAATALLMVGGCLLCCGAWVCTGRPDLSFPVKYSAPRRPTATGDYDKKNYV

SEQ ID NO: 616 - protein, 180 aa, Homo sapiens
MASTSYDYCRVPMEDGDKRCKLLLGIGILVLLIIVILGVPLIIFTIKANSEACRDGLRAVMECRNVTHLLQQELTEAQKGFQDVEAQAATCNHTVMALMASLDAEKAQGQKKVEELEGEITTLNHKLQDASAEVERLRRENQVLSVRIADKKYYPSSQDSSSAAAPQLLIVLLGLSALLQ

SEQ ID NO: 617 - protein, 381 aa, Homo sapiens
MTVARPSVPAALPLLGELPRLLLLVLLCLPAVWGDCGLPPDVPNAQPALEGRTSFPEDTVITYKCEESFVKIPGEKDSVICLKGSQWSDIEEFCNRSCEVPTRLNSASLKQPYITQNYFPVGTVVEYECRPGYRREPSLSPKLTCLQNLKWSTAVEFCKKKSCPNPGEIRNGQIDVPGGILFGATISFSCNTGYKLFGSTSSFCLISGSSVQWSDPLPECREIYCPAPPQIDNGIIQGERDHYGYRQSVTYACNKGFTMIGEHSIYCTVNNDEGEWSGPPPECRGKSLTSKVPPTVQKPTTVNVPTTEVSPTSQKTTTKTTTPNAQATRSTPVSRTTKHFHETTPNKGSGTTSGTTRLLSGHTCFTLTGLLGTLVTMGLLT

SEQ ID NO: 618 - protein, 248 aa, Homo sapiens
MQTCPLAFPGHVSQALGTLLFLAASLSAQNEGWDSPICTEGVVSVSWGENTVMSCNISNAFSHVNIKLRAHGQESAIFNEVAPGYFSRDGWQLQVQGGVAQLVIKGARDSHAGLYMWHLVGHQRNNRQVTLEVSGAEPQSAPDTGFWPVPAVVTAVFILLVALVMFAWYRCRCSQQRREKKFFLLEPQMKVAALRAGAQQGLSRASAELWTPDSEPTPRPLALVFKPSPLGALELLSPQPLFPYAADP

SEQ ID NO: 619 - protein, 272 aa, Homo sapiens
MSCHNCSDPQVLCSSGQLFLQPLWDHLRSWEALLQSPFFPVIFSITTYVGFCLPFVVLDILCSWVPALRRYKIHPDFSPSAQQLLPCLGQTLYQHVMFVFPVTLLHWARSPALLPHEAPELLLLLHHILFCLLLFDMEFFVWHLLHHKVPWLYRTFHKVHHQNSSSFALATQYMSVWELFSLGFFDMMNVTLLGCHPLTTLTFHVVNIWLSVEDHSGYNFPWSTHRLVPFGWYGGVVHHDLHHSHFNCNFAPYFTHWDKILGTLRTASVPAR

SEQ ID NO: 620 - protein, 662 aa, Homo sapiens
MGLYRIRVSTGASLYAGSNNQVQLWLVGQHGEAALGKRLWPARGKETELKVEVPEYLGPLLFVKLRKRHLLKDDAWFCNWISVQGPGAGDEVRFPCYRWVEGNGVLSLPEGTGRTVGEDPQGLFQKHREEELEERRKLYRWGNWKDGLILNMAGAKLYDLPVDERFLEDKRVDFEVSLAKGLADLAIKDSLNVLTCWKDLDDFNRIFWCGQSKLAERVRDSWKEDALFGYQFLNGANPVVLRRSAHLPARLVFPPGMEELQAQLEKELEGGTLFEADFSLLDGIKANVILCSQQHLAAPLVMLKLQPDGKLLPMVIQLQLPRTGSPPPPLFLPTDPPMAWLLAKCWVRSSDFQLHELQSHLLRGHLMAEVIVVATMRCLPSIHPIFKLIIPHLRYTLEINVRARTGLVSDMGIFDQIMSTGGGGHVQLLKQAGAFLTYSSFCPPDDLADRGLLGVKSSFYAQDALRLWEIIYRYVEGIVSLHYKTDVAVKDDPELQTWCREITEIGLQGAQDRGFPVSLQARDQVCHFVTMCIFTCTGQHASVHLGQLDWYSWVPNAPCTMRLPPPTTKDATLETVMATLPNFHQASLQMSITWQLGRRQPVMVAVGQHEEEYFSGPEPKAVLKKFREELAALDKEIEIRNAKLDMPYEYLRPSVVENSVAI

SEQ ID NO: 621 - protein, 271 aa, Homo sapiens
MVLIKEFRVVLPCSVQEYQVGQLYSVAEASKNETGGGEGIEVLKNEPYEKDGEKGQYTHKIYHLKSKVPAFVRMIAPEGSLVFHEKAWNAYPYCRTIVTNEYMKDDFFIKIETWHKPDLGTLENVHGLDPNTWKTVEIVHIDIADRSQVEPADYKADEDPALFQSVKTKRGPLGPNWKKELANSPDCPQMCAYKLVTIKFKWWGLQSKVENFIQKQEKRIFTNFHRQLFCWIDKWIDLTMEDIRRMEDETQKELETMRKRGSVRGTSAADV

SEQ ID NO: 622 - protein, 341 aa, Homo sapiens
MGELMAFLLPLIIVLMVKHSDSRTHSLRYFRLGVSDPIHGVPEFISVGYVDSHPITTYDSVTRQKEPRAPWMAENLAPDHWERYTQLLRGWQQMFKVELKRLQRHYNHSGSHTYQRMIGCELLEDGSTTGFLQYAYDGQDFLIFNKDTLSWLAVDNVAHTIKQAWEANQHELLYQKNWLEEECIAWLKRFLEYGKDTLQRTEPPLVRVNRKETFPGVTALFCKAHGFYPPEIYMTWMKNGEEIVQEIDYGDILPSGDGTYQAWASIELDPQSSNLYSCHVEHCGVHMVLQVPQESETIPLVMKAVSGSIVLVIVLAGVGVLVWRRRPREQNGAIYLPTPDR

SEQ ID NO: 623 - protein, 383 aa, Homo sapiens
MGLGRVLLFLAVAFPFAPPAAAAEPHSLRYNLMVLSQDGSVQSGFLAEGHLDGQPFLRYDRQKRRAKPQGQWAEDVLGAETWDTETEDLTENGQDLRRTLTHIKDQKGGLHSLQEIRVCEIHEDSSTRGSRHFYYNGELFLSQNLETQESTVPQSSRAQTLAMNVTNFWKEDAMKTKTHYRAMQADCLQKLQRYLKSGVAIRRTVPPMVNVTCSEVSEGNITVTCRASSFYPRNITLTWRQDGVSLSHNTQQWGDVLPDGNGTYQTWVATRIRQGEEQRFTCYMEHSGNHGTHPVPSGKALVLQSQRTDFPYVSAAMPCFVIIIILCVPCCKKKTSAAEGPELVSLQVLDQHPVGTGDHRDAAQLGFQPLMSATGSTGSTEGA

SEQ ID NO: 624 - protein, 362 aa, Homo sapiens
MAPRSLLLLLSGALALTDTWAGSHSLRYFSTAVSRPGRGEPRYIAVEYVDDTQFLRFDSDAAIPRMEPREPWVEQEGPQYWEWTTGYAKANAQTDRVALRNLLRRYNQSEAGSHTLQGMNGCDMGPDGRLLRGYHQHAYDGKDYISLNEDLRSWTAADTVAQITQRFYEAEEYAEEFRTYLEGECLELLRRYLENGKETLQRADPPKAHVAHHPISDHEATLRCWALGFYPAEITLTWQRDGEEQTQDTELVETRPAGDGTFQKWAAVVVPSGEEQRYTCHVQHEGLPQPLILRWEQSPQPTIPIVGIVAGLVVLGAVVTGAVVAAVMWRKKSSDRNRGSYSQAAVTDSAQGSGVSLTANKV

SEQ ID NO: 625 - protein, 1038 aa, Homo sapiens
  MISC_FEATURE (910)..(910): "Xaa" = any amino acid
MWRCGGRQGLCVLRRLSGGHAHHRAWRWNSNRACERALQYKLGDKIHGFTVNQVTSVPELFLTAVKLTHDDTGARYLHLAREDTNNLFSVQFRTTPMDSTGVPHILEHTVLCGSQKYPCRNPFFKMLNRSLSTFMNAFTASDYTLYPFSTQNPKDFQNLLSVYLDATFSPCLRELDFWQEGWRLEHENPSDPQTPLVFKGVVFNEMKGAFTDNERIFSQHLQNRLLPDHTYSVVSGGDPLCIPELTWEQLKQFHATHYHPSNARFFTYGNFPLEQHLKQIHEEALSKFQKIEPSTVVPAQTPWDKPREFQITCGPDSFATDPSKQTTVSVSFLLPDITDTFEAFTLSLLSSLLTSGPNSPFYKALIESGLGTEFSPDVGYNGYTREAYFSVGLQGIVEKDIETVRSLIDRTIDEVVETRIEDDRIEALLHKIEIQMKHQSTSFGLMLTSYIASCWNHDGDPVELLKLGNQLAKFRQCLQENPKFLQEKVKQYFKNNQHKLTLSMRPDDKYHEKQAQVEATKLKQKVEALSPGDRQQIYEKGLELRSQQSKPQDASCLPALKVSDIEPTIPVTELDVVLTAGDIPVQYCAQPTNGMVYFRAFSSLNTLPEELRPYVPLFCSILTKLGCGLLDYREQAQQIELKTGGMSASPHVLPDDSHMDTYEQVGVLFSSLCLDRNLPDMMQLWSEIFNNPCFEEEEHFKVLVKMTAQELANGIPDSGHLYASIRAGRTLTPAGDLQETFSGMDQVRLMKRIAEMTDIKPILRKLPRIKKHLLNGDNMRCSVNATPQQMPQTEKAVEDFLRSIGRSKKERRPVRPHTVEKPVPSSSGGDAHVPHGSQVIRKLVMEPTFKPWQMKTHFLMPFPVNYVGECIRTVPYTDPDHASLKILARLMTAKFLHTEIREKGGAYGGXAKLSHNGIFTLYSYRDPNTIETLQSFGKAVDWAKSGKFTQQDIDEAKLSVFSTVDAPVAPSDKGMDHFLYGLSDEMKQAHREQLFAVSHDKLLAVSDRYLGTGKSTHGLAILGPENPKIAKDPSWIIR

SEQ ID NO: 626 - protein, 595 aa, Homo sapiens
MWKSSFQYIASCWNHDGDPVELLKLGNQLAKFRQCLQENPKFLQEKVKQYFKNNQHKLTLSMRPDDKYHEKQAQVEATKLKQKVEALSPGDRQQIYEKGLELRSQQSKPQDASCLPALKVSDIEPTIPVTELDVVLTAGDIPVQYCAQPTNGMVYFRAFSSLNTLPEELRPYVPLFCSVLTKLGCGLLDYREQAQQIELKTGGMSASPHVLPDDSHMDTYEQGVLFSSLCLDRNLPDMMQLWSEIFNNPCFEEEEHFKVLVKMTAQELANGIPDSGHLYASIRAGRTLTPAGDLQETFSGMDQVRLMKRIAEMTDIKPILRKLPRIKKHLLNGDNMRCSVNATPQQMPQTEKAVEDFLRSIGRSKKERRPVRPHTVEKPVPSSSGGDAHVPHGSQVIRKLVMEPTFKPWQMKTHFLMPFPVNYVGECIRTVPYTDPDHASLKILARLMTAKFLHTEIREKGGAYGGGAKLSHNGIFTLYSYRDPNTIETLQSFGKAVDWAKSGKFTQQDIDEAKLSVFSTVDAPVAPSDKGMDHFLYGLSDEMKQAHREQLFAVSHDKLLAVSDRYLGTGKSTHGLAILGPENPKIAKDPSWIIR

SEQ ID NO: 627 - protein, 775 aa, Homo sapiens
MLQGLLPVSLLLSVAVSAIKELPGVKKYEVVYPIRLHPLHKREAKEPEQQEQFETELKYKMTINGKIAVLYLKKNKNLLAPGYTETYYNSTGKEITTSPQIMDDCYYQGHILNEKVSDASISTCRGLRGYFSQGDQRYFIEPLSPIHRDGQEHALFKYNPDEKNYDSTCGMDGVLWAHDLQQNIALPATKLVKLKDRKVQEHEKYIEYYLVLDNGEFKRYNENQDEIRKRVFEMANYVNMLYKKLNTHVALVGMEIWTDKDKIKITPNASFTLENFSKWRGSVLSRRKRHDIAQLITATELAGTTVGLAFMSTMCSPYSVGVVQDHSDNLLRVAGTMAHEMGHNFGMFHDDYSCKCPSTICVMDKALSFYIPTDFSSCSRLSYDKFFEDKLSNCLFNAPLPTDIISTPICGNQLVEMGEDCDCGTSEECTNICCDAKTCKIKATFQCALGECCEKCQFKKAGMVCRPAKDECDLPEMCNGKSGNCPDDRFQVNGFPCHHGKGHCLMGTCPTLQEQCTELWGPGTEVADKSCYNRNEGGSKYGYCRRVDDTLIPCKANDTMCGKLFCQGGSDNLPWKGRIVTFLTCKTFDPEDTSQEIGMVANGTKCGDNKVCINAECVDIEKAYKSTNCSSKCKGHAVCDHELQCQCEEGWIPPDCDDSSVVFHFSIVVGVLFPMAVIFVVVAMVIRHQSSREKQKKDQRPLSTTGTRPHKQKRKPQMVKAVQPQEMSQMKPHVYDLPVEGNEPPASFHKDTNALPPTVFKDNPMSTPKDSNPKA

SEQ ID NO: 628 - protein, 540 aa, Homo sapiens
MLQGLLPVSLLLSVAVSAIKELPGVKKYEVVYPIRLHPLHKREAKEPEQQEQFETELKYKMTINGKIAVLYLKKNKNLLAPGYTETYYNSTGKEITTSPQIMDDCYYQGHILNEKVSDASISTCRGLRGYFSQGDQRYFIEPLSPIHRDGQEHALFKYNPDEKNYDSTCGMDGVLWAHDLQQNIALPATKLVKLKDRKVQEHEKYIEYYLVLDNGEFKRYNENQDEIRKRVFEMANYVNMLYKKLNTHVALVGMEIWTDKDKIKITPNASFTLENFSKWRGSVLSRRKRHDIAQLITATELAGTTVGLAFMSTMCSPYSVGVVQDHSDNLLRVAGTMAHEMGHNFGMFHDDYSCKCPSTICVMDKALSFYIPTDFSSCSRLSYDKFFEDKLSNCLFNAPLPTDIISTPICGNQLVEMGEDCDCGTSEECTNICCDAKTCKIKATFQCALGECCEKCQFKKAGMVCRPAKDECDLPEMCNGKSGNCPDDRFQVNGFPCHHGKGHCLMGTCPTLREQCTELWGPGRRTNPFPCACAKENHFR

SEQ ID NO: 629 - protein, 775 aa, Homo sapiens
MLQGLLPVSLLLSVAVSAIKELPGVKKYEVVYPIRLHPLHKREAKEPEQQEQFETELKYKMTINGKIAVLYLKKNKNLLAPGYTETYYNSTGKEITTSPQIMDDCYYQGHILNEKVSDASISTCRGLRGYFSQGDQRYFIEPLSPIHRDGQEHALFKYNPDEKNYDSTCGMDGVLWAHDLQQNIALPATKLVKLKDRKVQEHEKYIEYYLVLDNGEFKRYNENQDEIRKRVFEMANYVNMLYKKLNTHVALVGMEIWTDKDKIKITPNASFTLENFSKWRGSVLSRRKRHDIAQLITATELAGTTVGLAFMSTMCSPYSVGVVQDHSDNLLRVAGTMAHEMGHNFGMFHDDYSCKCPSTICVMDKALSFYIPTDFSSCSRLSYDKFFEDKLSNCLFNAPLPTDIISTPICGNQLVEMGEDCDCGTSEECTNICCDAKTCKIKATFQCALGECCEKCQFKKAGMVCRPAKDECDLPEMCNGKSGNCPDDRFQVNGFPCHHGKGHCLMGTCPTLREQCTELWGPGTEVADKSCYNRNEGGSKYGYCRRVDDTLIPCKANDTMCGKLFCQGGSDNLPWKGRIVTFLTCKTFDPEDTSQEIGMVANGTKCGDNKVCINAECVDIEKAYKSTNCSSKCKGHAVCDHELQCQCEEGWIPPDCDDSSVVFHFSIVVGVLFPMAVIFVVVAMVIRHQSSREKQKKDQRPLSTTGTRPHKQKRKPQMVKAVQPQEMSQMKPHVYDLPVEGNEPPASFHKDTNALPPTVFKDNPMSTPKDSNPEA

SEQ ID NO: 630 - protein, 824 aa, Homo sapiens
MRGLGLWLLGAMMLPAIAPSRPWALMEQYEVVLPRRLPGPRVRRALPSHLGLHPERVSYVLGATGHNFTLHLRKNRDLLGSGYTETYTAANGSEVTEQPRGQDHCLYQGHVEGYPDSAASLSTCAGLRGFFQVGSDLHLIEPLDEGGEGGRHAVYQAEHLLQTAGTCGVSDDSLGSLLGPRTAAVFRPRPGDSLPSRETRYVELYVVVDNAEFQMLGSEAAVRHRVLEVVNHVDKLYQKLNFRVVLVGLEIWNSQDRFHVSPDPSVTLENLLTWQARQRTRRHLHDNVQLITGVDFTGTTVGFARVSAMCSHSSGAVNQDHSKNPVGVACTMAHEMGHNLGMDHDENVQGCRCQERFEAGRCIMAGSIGSSFPRMFSDCSQAYLESFLERPQSVCLANAPDLSHLVGGPVCGNLFVERGEQCDCGPPEDCRNRCCNSTTCQLAEGAQCAHGTCCQECKVKPAGELCRPKKDMCDLEEFCDGRHPECPEDAFQENGTPCSGGYCYNGACPTLAQQCQAFWGPGGQAAEESCFSYDILPGCKASRYRADMCGVLQCKGGQQPLGRAICIVDVCHALTTEDGTAYEPVPEGTRCGPEKVCWKGRCQDLHVYRSSNCSAQCHNHGVCNHKQECHCHAGWAPPHCAKLLTEVHAASGSLPVLVVVVLVLLAVVLVTLAGIIVYRKARSRILSRNVAPKTTMGRSNPLFHQAASRVPAKGGAPAPSRGPQELVPTTHPGQPARHPASSVALKRPPPAPPVTVSSPPFPVPVYTRQAPKQVIKPTFAPPVPPVKPGAGAANPGPAEGAVGPKVALKPPIQRKQGAGAPTAP

SEQ ID NO: 631 - protein, 267 aa, Homo sapiens
MRLTVLCAVCLLPGSLALPLPQEAGGMSELQWEQAQDYLKRFYLYDSETKNANSLEAKLKEMQKFFGLPITGMLNSRVIEIMQKPRCGVPDVAEYSLFPNSPKWTSKVVTYRIVSYTRDLPHITVDRLVSKALNMWGKEIPLHFRKVVWGTADIMIGFARGAHGDSYPFDGPGNTLAHAFAPGTGLGGDAHFDEDERWTDGSSLGINFLYAATHELGHSLGMGHSSDPNAVMYPTYGNGDPQNFKLSQDDIKGIQKLYGKRSNSRKK

SEQ ID NO: 632 - protein, 761 aa, Homo sapiens
MNWRFVELLYFLFIWGRISVQPSHQEPAGTDQHVSKEFDWLISDRGPFHHSRSYLSFVERHRQGFTTRYKIYREFARWKVRNTAIERRDLVRHPVPLMPEFQRSIRLLGRRPTTQQFIDTIIKKYGTHLLISATLGGEEALTMYMDKSRLDRKSGNATQSVEALHQLASSYFVDRDGTMRRLHEIQISTGAIKVTETRTGPLGCNSYDNLDSVSSVLLQSTESKLHLQGLQIIFPQYLQEKFVQSALSYIMCNGEGEYLCQNSQCRCQCAEEFPQCNCPITDIQIMEYTLANMAKSWAEAYKDLENSDEFKSFMKRLPSNHFLTIGSIHQHWGNDWDLQNRYKLLQSATEAQRQKIQRTARKLFGLSVRCRHNPNHQLPRERTIQQWLARVQSLLYCNENGFWGTFLESQRSCVCHGSTTLCQRPIPCVIGGNNSCTMCSLANISLCGSCNKGYKLYRGRCEPQNVDSERSEQFISFETDLDFQDLELKYLLQKMDSRLYVHTTFISNEIRLDTFFDPRWRKRMSLTLKSNKNRMDFIHMVIGMSMRICQMRNSSLDPMFFVYVNPFSGSHSEGWNMPFGEFGYPRWEKIRLQNSQCYNWTLLLGNRWKTFFETVHIYLRSRTRLPTLLRNETGQGPVDLSDPSKRQFYIKISDVQVFGYSLRFNADLLRSAVQQVNQSYTQGGQFYSSSSVMLLLLDIRDRINRLAPPVAPGKPQLDLFSCMLKHRLKLTNSEIIRVNHALDLYNTEILKQSDQMTAKLC

SEQ ID NO: 633 - protein, 1785 aa, Homo sapiens
MQESQTKSMFVSRALEKILADKEVKRPQHSQLRRACQVALDEIKAEIEKQRLGTAAPPKANFIEADKYFLPFELACQSKSPRVVSTSLDCLQKLIAYGHITGNAPDSGAPGKRLIDRIVETICSCFQGPQTDEGVQLQIIKALLTAVTSPHIEIHEGTILQTVRTCYNIYLASKNLINQTTAKATLTQMLNVIFTRMENQVLQEARRLEKPIQSKPQSPVIQAAAVSPKFVRLKHSQAQSKPTTPEKTDLTNGEHARSDSGKVSTENGDAPRERGSSLSGTDDGAQEVVKDILEDVVTSAIKEAAEKHGLTEPERVLGELECQECAIPPGVDENSQTNGIADDRQSLSSADNLESDAQGHQVAARFSHVLQKDAFLVFRSLCKLSMKPLGEGPPDPKSHELRSKVVSLQLLLSVLQNAGPVFRTHEMFINAIKQYLCVALSKNGVSSVPDVFELSLAIFLTLLSNFKMHLKMQIEVFFKEIFLNILETSTSSFEHRWMVIQTLTRICADAQCVVDIYVNYDCDLNAANIFERLVNDLSKIAQGRSGHELGMTPLQELSLRKKGLECLVSILKCMVEWSKDLYVNPNHQTSLGQERLTDQEIGDGKGLDMARRCSVTSMESTVSSGTQTTVQDDPEQFEVIKQQKEIIEHGIELFNKKPKRGIQFLQEQGMLGTSVEDIAQFLHQEERLDSTQVGDFLGDSARFNKEVMYAYVDQLDFCEKEFVSALRTFLEGFRLPGEAQKIDRLMEKFAARYIECNQGQTLFASADTAYVLAYSIIMLTTDLHSPQVKNKMTKEQYIKMNRGINDSKDLPEEYLSSIYEEIEGKKIAMKETKELTIATKSTKQNVASEKQRRLLYNLEMEQMAKTAKALMEAVSHAKAPFTSATHLDHVRPMFKLVWTPLLAAYSIGLQNCDDTEVASLCLEGIRCAIRIACIFGMQLERDAYVQALARFSLLTASSSITKMKQKNIDTIKTLITVAHTDGNYLGNSWHEILKCISQLELAQLIGTGVKTRYLSGSGREREGSLKGHTLAGEEFMGLGLGNLVSGGVNKRQMASFQESVGETSSQSVVVAVDRIFTGSTRLDGNAIVDFVRWLCAVSMDELASPHHPRMFSLQKIVEISYYNMNRIRLQWSRIWHVIGDHFNKVGCNPNEDVAIFAVDSLRQLSMKFLEKGELANFRFQKDFLRPFEHIMKKNRSPTIRDMAIRCIAQMVNSQAANIRSGWKNIFAVFHQAASDHDGNIVELAFQTTCHIVTTIFQHHFPAAIDSFQDAVKCLSEFACNAAFPDTSMEAIRLIRFCGKYVSERPRVLQEYTSDDMNVAPGDRVWVRGWFPILFELSCIINRCKLDVRTRGLTVMFEIMKSYGHTFEKHWWQDLFRIVFRIFDNMKLPEQLSEKSEWMTTTCNHALYAICDVFTQFYEALNEVLLSDVFAQLQWCVKQDNEQLARSGTNCLENLVISNGEKFSPEVWDETCNCMLDIFKTTIPHVLLTWRPVGMEEDSSEKHLDVDLDRQSLSSIDKNPSERGQSQLSNPTDDSWKGRPYANQKLFASLLIKCVVQLELIQTIDNIVFYPATSKKEDAEHMVAAQQDTLDADIHIETEDQGMYKYMSSQHLFKLLDCLQESHSFSKAFNSNYEQRTVLWRAGFKGKSKPNLLKQETSSLACCLRILFRMYVDENRRDSWEEIQQRLLTVCSEALAYFITVNSESHREAWTSLLLLLLTKTLKINDEKFKAHASMYYPYLCEIMQFDLIPELRAVLRKFFLRISVVYKIWIPEEPSQVPAALSPVW

SEQ ID NO: 634 - protein, 132 aa, Homo sapiens
MCDAFVGTWKLVSSENFDDYMKEVGVGFATRKVAGMAKPNMIISVNGDVITIKSESTFKNTEISFILGQEFDEVTADDRKVKSTITLDGGVLVHVQKWDGKSTTIKRKREDDKLVVECVMKGVTSTRVYERA

SEQ ID NO: 635 - protein, 253 aa, Homo sapiens
MGQCGITSSKTVLVFLNLIFWGAAGILCYVGAYVFITYDDYDHFFEDVYTLIPAVVIIAVGALLFIIGLIGCCATIRESRCGLATFVIILLLVFVTEVVVVVLGYVYRAKVENEVDRSIQKVYKTYNGTNPDAASRAIDYVQRQLHCCGIHNYSDWENTDWFKETKNQSVPLSCCRETASNCNGSLAHPSDLYAEGCEALVVKKLQEIMMHVIWAALAFAAIQLLGMLCACIVLCRRSRDPAYELLITGGTYA

SEQ ID NO: 636 - protein, 169 aa, Homo sapiens
MAAESLPFSFGTLSSWELEAWYEDLQEVLSSDENGGTYVSPPGNEEEESKIFTTLDPASLAWLTEEEPEPAEVTSTSQSPHSPDSSQSSLAQEEEEEDQGRTRKRKQSGHSPARAGKQRMKEKEQENERKVAQLAEENERLKQEIERLTREVEATRRALIDRMVNLHQA

SEQ ID NO: 637 - protein, 165 aa, Homo sapiens
MAPNASCLCVHVRSEEWDLMTFDANPYDSVKKIKEHVRSKTKVPVQDQVLLLGSKILKPRRSLSSYGIDKEKTIHLTLKVVKPSDEELPLFLVESGDEAKRHLLQVRRSSSVAQVKAMIETKTGIIPETQIVTCNGKRLEDGKMMADYGIRKGNLLFLASYCIGG

SEQ ID NO: 638 - protein, 460 aa, Homo sapiens
MAPGRAVAGLLLLAAAGLGGVAEGPGLAFSEDVLSVFGANLSLSAAQLQHLLEQMGAASRVGVPEPGQLHFNQCLTAEEIFSLHGFSNATQITSSKFSVICPAVLQQLNFHPCEDRPKHKTRPSHSEVWGYGFLSVTIINLASLLGLILTPLIKKSYFPKILTFFVGLAIGTLFSNAIFQLIPEAFGFDPKVDSYVEKAVAVFGGFYLLFFFERMLKMLLKTYGQNGHTHFGNDNFGPQEKTHQPKALPAINGVTCYANPAVTEANGHIHFDNVSVVSLQDGKKEPSSCTCLKGPKLSEIGTIAWMITLCDALHNFIDGLAIGASCTLSLLQGLSTSIAILCEEFPHELGDFVILLNAGMSTRQALLFNFLSACSCYVGLAFGILVGNNFAPNIIFALAGGMFLYISLADMFPEMNDMLREKVTGRKTDFTFFMIQNAGMLTGFTAILLITLYAGEIELE

SEQ ID NO: 639 - protein, 398 aa, Homo sapiens
MDPVVGCGRGLFGFVFSAGGPRGVLPRPCRVLVLLNPRGGKGKALQLFRSHVQPLLAEAEISFTLMLTERRNHARELVRSEELGRWDALVVMSGDGLMHEVVNGLMERPDWETAIQKPLCSLPAGSGNALAASLNHYAGYEQVTNEDLLTNCTLLLCRRLLSPMNLLSLHTASGLRLFSVLSLAWGFIADVDLESEKYRRLGEMRFTLGTFLRLAALRTYRGRLAYLPVGRVGSKTPASPVVVQQGPVDAHLVPLEEPVPSHWTVVPDEDFVLVLALLHSHLGSEMFAAPMGRCAAGVMHLFYVRAGVSRAMLLRLFLAMEKGRHMEYECPYLVYVPVVAFRLEPKDGKGVFAVDGELMVSEAVQGQVHPNYFWMVSGCVEPPPSWKPQQMPPPEEPL

SEQ ID NO: 640 - protein, 325 aa, Homo sapiens
MDMWTALLILQALLLPSLADGATPALRFVAVGDWGGVPNAPFHTAREMANAKEIARTVQILGADFILSLGDNFYFTGVQDINDKRFQETFEDVFSDRSLRKVPWYVLAGNHDHLGNVSAQIAYSKISKRWNFPSPFYRLHFKIPQTNVSVAIFMLDTVTLCGNSDDFLSQQPERPRDVKLARTQLSWLKKQLAAAREDYVLVAGHYPVWSIAEHGPTHCLVKQLRPLLATYGVTAYLCGHDHNLQYLQDENGVGYVLSGAGNFMDPSKRHQRKVPNGYLRFHYGTEDSLGGFAYVEISSKEMTVTYIEASGKSLFKTRLPRRARP

SEQ ID NO: 641 - protein, 211 aa, Homo sapiens
MVAHNQVAADNAVSTAAEPRRRPEPSSSSSSSPAAPARPRPCPAVPAPAPGDTHFRTFRSHADYRRITRASALLDACGFYWGPLSVHGAHERLRAEPVGTFLVRDSRQRNCFFALSVKMASGPTSIRVHFQAGRFHLDGSRESFDCLFELLEHYVAAPRRMLGAPLRQRRVRPLQELCRQRIVATVGRENLARIPLNPVLRDYLSSFPFQI

SEQ ID NO: 642 - protein, 463 aa, Homo sapiens
MGAGPSLLLAALLLLLSGDGAVRCDTPANCTYLDLLGTWVFQVGSSGSQRDVNCSVMGPQEKKVVVYLQKLDTAYDDLGNSGHFTIIYNQGFEIVLNDYKWFAFFKYKEEGSKVTTYCNETMTGWVHDVLGRNWACFTGKKVGTASENVYVNTAHLKNSQEKYSNRLYKYDHNFVKAINAIQKSWTATTYMEYETLTLGDMIRRSGGHSRKIPRPKPAPLTAEIQQKILHLPTSWDWRNVHGINFVSPVRNQASCGSCYSFASMGMLEARIRILTNNSQTPILSPQEVVSCSQYAQGCEGGFPYLIAGKYAQDFGLVEEACFPYTGTDSPCKMKEDCFRYYSSEYHYVGGFYGGCNEALMKLELVHHGPMAVAFEVYDDFLHYKKGIYHHTGLRDPFNPFELTNHAVLLVGYGTDSASGMDYWIVKNSWGTGWGENGYFRIRRGTDECAIESIAVAATPIPKL

SEQ ID NO: 643 - protein, 166 aa, Homo sapiens [sequence omitted]

SEQ ID NO: 644 - protein, 688 aa, Homo sapiens
MWCIVLFSLLAWVYAEPTMYGEILSPNYPQAYPSEVEKSWDIEVPEGYGIHLYFTHLDIELSENCAYDSVQIISGDTEEGRLCGQRSSNNPHSPIVEEFQVPYNKLQVIFKSDFSNEERFTGFAAYYVATDINECTDFVDVPCSHFCNNFIGGYFCSCPPEYFLHDDMKNCGVNCSGDVFTALIGEIASPNYPKPYPENSRCEYQIRLEKGFQVVVTLRREDFDVEAADSAGNCLDSLVFVAGDRQFGPYCGHGFPGPLNIETKSNALDIIFQTDLTGQKKGWKLRYHGDPMPCPKEDTPNSVWEPAKAKYVFRDVVQITCLDGFEVVEGRVGATSFYSTCQSNGKWSNSKLKCQPVDCGIPESIENGKVEDPESTLFGSVIRYTCEEPYYYMENGGGGEYHCAGNGSWVNEVLGPELPKCVPVCGVPREPFEEKQRIIGGSDADIKNFPWQVFFDNPWAGGALINEYWVLTAAHVVEGNREPTMYVGSTSVQTSRLAKSKMLTPEHVFIHPGWKLLEVPEGRTNFDNDIALVRLKDPVKMGPTVSPICLPGTSSDYNLMDGDLGLISGWGRTEKRDRAVRLKAARLPVAPLRKCKEVKVEKPTADAEAYVFTPNMICAGGEKGMDSCKGDSGGAFAVQDPNDKTKFYAAGLVSWGPQCGTYGLYTRVKNYVDWIMKTMQENSTPRED

SEQ ID NO: 645 - protein, 343 aa, Homo sapiens
MFSFNMFDHPIPRVFQNRFSTQYRCFSVSMLAWPNDRSDVEKGGKIIMPPSALDQLSRLNITYPMLFKLTNKNSDRMTHCGVLEFVADEGICYLPHWMMQNLLLEEDGLVQLETVNLQVATYSKSKFCYLPHWMMQNLLLEEGGLVQVESVNLQVATYSKFQPQSADFLDITNPKAVLENALRNFACLTTGDVIAINYNEKIYELRVMETKPDKAVSIHECDMNVDFDAPLGYKEPERQVQHEESTEGEADHSGYAGELGFRAFSGSGNRLDGKKKGVEPSPSPIKPGDIKRGIPNYEFKLGKITFIRNSRPLVKKVEEDEAGGRFVAFSGEGQSLRKKGRKP

SEQ ID NO: 646 - protein, 390 aa, Homo sapiens
MNSLSEANTKFMFDLFQQFRKSKENNIFYSPISITSALGMVLLGAKDNTAQQISKVLHFDQVTENTTEKAATYHVDRSGNVHHQFQKLLTEFNKSTDAYELKIANKLFGEKTYQFLQEYLDAIKKFYQTSVESTDFANAPEESRKKINSWVESQTNEKIKNLFPDGTIGNDTTLVLVNAIYFKGQWENKFKKENTKEEKFWPNKNTYKSVQMMRQYNSFNFALLEDVQAKVLEIPYKGKDLSMIVLLPNEIDGLQKLEEKLTAEKLMEWTSLQNMRETCVDLHLPRFKMEESYDLKDTLRTMGMVNIFNGDADLSGMTWSHGLSVSKVLHKAFVEVTEEGVEAAAATAVVVVELSSPSTNEEFCCNHPFLFFIRQNKTNSILFYGRFSSP

SEQ ID NO: 647 - protein, 382 aa, Homo sapiens
MGLLLPLALCILVLCCGKLSPPQLALNPSALLSRGCNDSDVLAVAGFALRDINKDRKDGYVLRLNRVNDAQEYRRGGLGSLFYLTLDVLETDCHVLRKKAWQDCGMRIFFESVYGQCKAIFYMNNPSRVLYLAAYNCTLRPVSKKKIYMTCPDCPSSIPTDSSNHQVLEAATESLAKYNNENTSKQYSLFKVTRASSQWVVGPSYFVEYLIKESPCTKSQASSCSLQSSDSVPVGLCKGSLTRTHWEKFVSVTCDFFESQAPATGSENSAVNQKPTNLPKVEESQQKNTPPTDSPSKAGPRGSVQYLPDLDDKNSQEKGPQEAFPVHLDLTTNPQGETLDISFLFLEPMEEKLVVLPFPKEKARTAECPGPAQNASPLVLPP

SEQ ID NO: 648 - protein, 376 aa, Homo sapiens
MDVLAEANGTFALNLLKTLGKDNSKNVFFSPMSMSCALAMVYMGAKGNTAAQMAQILSFNKSGGGGDIHQGFQSLLTEVNKTGTQYLLRVANRLFGEKSCDFLSSFRDSCQKFYQAEMEELDFISAVEKSRKHINTWVAEKTEGKIAELLSPGSVDPLTRLVLVNAVYFRGNWDEQFDKENTEERLFKVSKNEEKPVQMMFKQSTFKKTYIGEIFTQILVLPYVGKELNMIIMLPDETTDLRTVEKELTYEKFVEWTRLDMMDEEEVEVSLPRFKLEESYDMESVLRNLGMTDAFELGKADFSGMSQTDLSLSKVVHKSFVEVNEEGTEAAAATAAIMMMRCARFVPRFCADHPFLFFIQHSKTNGILFCGRFSSP

SEQ ID NO: 649 - protein, 415 aa, Homo sapiens
MEDLCVANTLFALNLFKHLAKASPTQNLFLSPWSISSTMAMVYMGSRGSTEDQMAKVLQFNEVGANAVTPMTPENFTSCGFMQQIQKGSYPDAILQAQAADKIHSSFRSLSSAINASTGNYLLESVNKLFGEKSASFREEYIRLCQKYYSSEPQAVDFLECAEEARKKINSWVKTQTKGKIPNLLPEGSVDGDTRMVLVNAVYFKGKWKTPFEKKLNGLYPFRVNSAQRTPVQMMYLREKLNIGYIEDLKAQILELPYAGDVSMFLLLPDEIADVSTGLELLESEITYDKLNKWTSKDKMAEDEVEVYIPQFKLEEHYELRSILRSMGMEDAFNKGRANFSGMSERNDLFLSEVFHQAMVDVNEEGTEAAAGTGGVMTGRTGHGGPQFVADHPFLFLIMHKITNCILFFGRFSSP

SEQ ID NO: 650 - protein, 165 aa, Homo sapiens
MAKMNLSSYILILTFSLFSQGILLSASKSIRNLDDDMVFNTFRLGKGFQKEDTAEKSVIAPSLEQYKNDESSFMNEEENKVSKNTGSKHNFLNHGLPLNLAIKGYQALKGSVDFPAENGVQNTESTQEKREIGDEENSAKFPIGRRDFDMLRCMLGRVYRPCWQV

SEQ ID NO: 651 - protein, 797 aa, Homo sapiens
MGTLGKAREAPRKPSHGCRAASKARLEAKPANSPFPSHPSLAHITQFRMMVSLGHLAKGASLDDLIDSCIQSFDADGNLCRSNQLLQVMLTMHRIVISSAELLQKVITLYKDALAKNSPGLCLKICYFVRYWITEFWVMFKMDASLTDTMEEFQELVKAKGEELHCRLIDTTQINARDWSRKLTQRIKSNTSKKRKVSLLFDHLEPEELSEHLTYLEFKSFRRISFSDYQNYLVNSCVKENPTMERSIALCNGISQWVQLMVLSRPTPQLRAEVFIKFIQVAQKLHQLQNFNTLMAVIGGLCHSSISRLKETSSHVPHEINKVLGEMTELLSSSRNYDNYRRAYGECTDFKIPILGVHLKDLISLYEAMPDYLGDGKVNVHKLLALYNHISELVQLQEVAPPLEANKDLVHLLTLSLDLYYTEDEIYELSYAREPRNHRAPPLTPSKPPVVVDWASGVSPKPDPKTISKHVQRMVDSVFKNYDHDQDGYISQEEFEKIAASFPFSFCVMDKDREGLISRDEITAYFMRASSIYSKLGLGFPHNFQETTYLKPTFCDNCAGFLWGVIKQGYRCKDCGMNCHKQCKDLVVFECKKRAKNPVAPTENNTSVGPVSNLCSLGAKDLLHAPEEGPFTFPNGEAVEHGEESKDRTIMLMGVSSQKISLRLKRAVAHKATQTESQPWIGSEGPSGPFVLSSPRKTAQDTLYVLPSPTSPCPSPVLVRKRAFVKWENKDSLIKSKEELRHLRLPTYQELEQEINTLKADNDALKIQLKYAQKKIESLQLEKSNHVLAQMEQGDCS

SEQ ID NO: 652 - protein, 662 aa, Homo sapiens
MVVSEVDIAKADPAAASHPLLLNGDATVAQKNPGSVAENNLCSQYEEKVRPCIDLIDSLRALGVEQDLALPAIAVIGDQSSGKSSVLEALSGVALPRGSGIVTRCPLVLKLKKLVNEDKWRGKVSYQDYEIEISDASEVEKEINKAQNAIAGEGMGISHELITLEISSRDVPDLTLIDLPGITRVAVGNQPADIGYKIKTLIKKYIQRQETISLVVVPSNVDIATTEALSMAQEVDPEGDRTIGILTKPDLVDKGTEDKVVDVVRNLVFHLKKGYMIVKCRGQQEIQDQLSLSEALQREKIFFENHPYFRDLLEEGKATVPCLAEKLTSELITHICKSLPLLENQIKETHQRITEELQKYGVDIPEDENEKMFFLIDKINAFNQDITALMQGEETVGEEDIRLFTRLRHEFHKWSTIIENNFQEGHKILSRKIQKFENQYRGRELPGFVNYRTFETIVKQQIKALEEPAVDMLHTVTDMVRLAFTDVSIKNFEEFFNLHRTAKSKIEDIRAEQEREGEKLIRLHFQMEQIVYCQDQVYRGALQKVREKELEEEKKKKSWDFGAFQSSSATDSSMEEIFQHLMAYHQEASKRISSHIPLIIQFFMLQTYGQQLQKAMLQLLQDKDTYSWLLKERSDTSDKRKFLKERLARLTQARRRLAQFPG

SEQ ID NO: 653 - protein, 323 aa, Homo sapiens
MWPLVAALLLGSACCGSAQLLFNKTKSVEFTFCNDTVVIPCFVTNMEAQNTTEVYVKWKFKGRDIYTFDGALNKSTVPTDFSSAKIEVSQLLKGDASLKMDKSDAVSHTGNYTCEVTELTREGETIIELKYRVVSWFSPNENILIVIFPIFAILLFWGQFGIKTLKYRSGGMDEKTIALLVAGLVITVIVIVGAILFVPGEYSLKNATGLGLIVTSTGILILLHYYVFSTAIGLTSFVIAILVIQVIAYILAVVGLSLCIAACIPMHGPLLISGLSILALAQLLGLVYMKFVASNQKTIQPPRKAVEEPLNAFKESKGMMNDE

SEQ ID NO: 654 - protein, 1863 aa, Homo sapiens
MDLSALRVEEVQNVINAMQKILECPICLELIKEPVSTKCDHIFCKFCMLKLLNQKKGPSQCPLCKNDITKRSLQESTRFSQLVEELLKIICAFQLDTGLEYANSYNFAKKENNSPEHLKDEVSIIQSMGYRNRAKRLLQSEPENPSLQETSLSVQLSNLGTVRTLRTKQRIQPQKTSVYIELGSDSSEDTVNKATYCSVGDQELLQITPQGTRDEISLDSAKKAACEFSETDVTNTEHHQPSNNDLNTTEKRAAERHPEKYQGSSVSNLHVEPCGTNTHASSLQHENSSLLLTKDRMNVEKAEFCNKSKQPGLARSQHNRWAGSKETCNDRRTPSTEKKVDLNADPLCERKEWNKQKLPCSENPRDTEDVPWITLNSSIQKVNEWFSRSDELLGSDDSHDGESESNAKVADVLDVLNEVDEYSGSSEKIDLLASDPHEALICKSERVHSKSVESNIEDKIFGKTYRKKASLPNLSHVTENLIIGAFVTEPQIIQERPLTNKLKRKRRPTSGLHPEDFIKKADLAVQKTPEMINQGTNQTEQNGQVMNITNSGHENKTKGDSIQNEKNPNPIESLEKESAFKTKAEPISSSISNMELELNIHNSKAPKKNRLRRKSSTRHIHALELVVSRNLSPPNCTELQIDSCSSSEEIKKKKYNQMPVRHSRNLQLMEGKEPATGAKKSNKPNEQTSKRHDSDTFPELKLTNAPGSFTKCSNTSELKEFVNPSLPREEKEEKLETVKVSNNAEDPKDLMLSGERVLQTERSVESSSISLVPGTDYGTQESISLLEVSTLGKAKTEPNKCVSQCAAFENPKGLIHGCSKDNRNDTEGFKYPLGHEVNHSRETSIEMEESELDAQYLQNTFKVSKRQSFAPFSNPGNAEEECATFSAHSGSLKKQSPKVTFECEQKEENQGKNESNIKPVQTVNITAGFPVVGQKDKPVDNAKCSIKGGSRFCLSSQFRGNETGLITPNKHGLLQNPYRIPPLFPIKSFVKTKCKKNLLEENFEEHSMSPEREMGNENIPSTVSTISRNNIRENVFKEASSSNINEVGSSTNEVGSSINEIGSSDENIQAELGRNRGPKLNAMLRLGVLQPEVYKQSLPGSNCKHPEIKKQEYEEVVQTVNTDFSPYLISDNLEQPMGSSHASQVCSETPDDLLDDGEIKEDTSFAENDIKESSAVFSKSVQKGELSRSPSPFTHTHLAQGYRRGAKKLESSEENLSSEDEELPCFQHLLFGKVNNIPSQSTRHSTVATECLSKNTEENLLSLKNSLNDCSNQVILAKASQEHHLSEETKCSASLFSSQCSELEDLTANTNTQDPFLIGSSKQMRHQSESQGVGLSDKELVSDDEERGTGLEENNQEEQSMDSNLGEAASGCESETSVSEDCSGLSSQSDILTTQQRDTMQHNLIKLQQEMAELEAVLEQHGSQPSNSYPSIISDSSALEDLRNPEQSTSEKAVLTSQKSSEYPISQNPEGLSADKFEVSADSSTSKNKEPGVERSSPSKCPSLDDRWYMHSCSGSLQNRNYPSQEELIKVVDVEEQQLEESGPHDLTETSYLPRQDLEGTPYLESGISLFSDDPESDPSEDRAPESARVGNIPSSTSALKVPQLKVAESAQSPAAAHTTDTAGYNAMEESVSREKPELTASTERVNKRMSMVVSGLTPEEFMLVYKFARKHHITLTNLITEETTHVVMKTDAEFVCERTLKYFLGIAGGKWVVSYFWVTQSIKERKMLNEHDFEVRGDVVNGRNHQGPKRARESQDRKIFRGLEICCYGPFTNMPTDQLEWMVQLCGASVVKELSSFTLGTGVHPIVVVQPDAWTEDNGFHAIGQMCEAPVVTREWVLDSVALYQCQELDTYLIPQIPHSHY

SEQ ID NO: 655 - protein, 715 aa, Homo sapiens
MSKAHKPWPYRRRSQFSSRKYLKKEMNSFQQQPPPFGTVPPQMMFPPNWQGAEKDAAFLAKDFNFLTLNNQPPPGNRSQPRAMGPENNLYSQYEQKVRPCIDLIDSLRALGVEQDLALPAIAVIGDQSSGKSSVLEALSGVALPRGSGIVTRCPLVLKLKKQPCEAWAGRISYRNTELELQDPGQVEKEIHKAQNVMAGNGRGISHELISLEITSPEVPDLTIIDLPGITRVAVDNQPRDIGLQIKALIKKYIQRQQTINLVVVPCNVDIATTEALSMAHEVDPEGDRTIGILTKPDLMDRGTEKSVMNVVRNLTYPLKKGYMIVKCRGQQEITNRLSLAEATKKEITFFQTHPYFRVLLEEGSATVPRLAERLTTELIMHIQKSLPLLEGQIRESHQKATEELRRCGADIPSQEADKMFFLIEKIKMFNQDIEKLVEGEEVVRENETRLYNKIREDFKNWVGILATNTQKVKNIIHEEVEKYEKQYRGKELLGFVNYKTFEIIVHQYIQQLVEPALSMLQKAMEIIQQAFINVAKKHFGEFFNLNQTVQSTIEDIKVKHTAKAENMIQLQFRMEQMVFCQDQIYSVVLKKVREEIFNPLGTPSQNMKLNSHFPSNESSVSSFTEIGIHLNAYFLETSKRLANQIPFIIQYFMLRENGDSLQKAMMQILQEKNRYSWLLQEQSETATKRRILKERIYRLTQARHALCQFSSKEIH

SEQ ID NO: 656 - protein, 629 aa, Homo sapiens
MENSTTTISREELEELQEAFNKIDIDNSGYVSDYELQDLFKEASLPLPGYKVREIVEKILSVADSNKDGKISFEEFVSLMQELKSKDISKTFRKIINKREGITAIGGTSTISSEGTQHSYSEEEKVAFVNWINKALENDPDCKHLIPMNPNDDSLFKSLADGILLCKMINLSEPDTIDERAINKKKLTPFTISENLNLALNSASAIGCTVVNIGASDLKEGKPHLVLGLLWQIIKVGLFADIEISRNEALIALLNEGEELEELMKLSPEELLLRWVNYHLTNAGWHTISNFSQDIKDSRAYFHLLNQIAPKGGEDGPAIAIDLSGINETNDLKRAGLMLQEADKLGCKQFVTPADVVSGNPKLNLAFVANLFNTYPCLHKPNNNDIDMNLLEGESKEERTFRNWMNSLGVNPYINHLYSDLADALVIFQLYEMIRVPVNWSHVNKPPYPALGGNMKKIENCNYAVELGKNKAKFSLVGIAGQDLNERNSTLTLALVWQLMRRYTLNVLSDLGEGEKVNDEIIIKWVNQTLKSANKKTSISSFKDKSISTSLPVLDLIDAIAPNAVRQEMIRRENLSDEDKLNNAKYAISVARKIGARIYALPDDLVEVKPKMVMTVFACLMGKGLNRIK

SEQ ID NO: 657 - protein, 470 aa, Homo sapiens
MTTCSRQFTSSSSMKGSCGIGGGIGAGSSRISSVLAGASCPASTYGGASVSSRFSSGGACGLGGGYGGGFSSSSSFGSGFGGGYGGGLGAGFGGGLGAGFGGGFAGGDGLLVGSEKVTMQNLNDRLASYLDKVRALEEANADLEVKIRDWYQRQRPSEIKDYSPYFKTIEDLRNKIIAATIENAHALLQIDNARLAADDFRTKYEARTGLRQTVEADVNGLRRVLDELTLARTDLEMQIEGLKEELAYLRKNHEEEMLALRGQTGGDVNVEMDAAPGVDLSRILNEMRDQYEQMAEKNRRDAETWFLSKTEELNKEVASNSELVQSSRSEVTELRRVLQGLEIELQSQLRMKASLENSLEETKGRYCMQLSQIQGLIGSVEEQLAQLRCEMEQQSQEYQILLDVKTRLEQEIATYRRLLEGEDAHLSSQQASGQSYSSREVFTSSSSSSAVRPGPSSEQSSSSFSQGQSS

SEQ ID NO: 658 - protein, 750 aa, Homo sapiens
MSQWYELQQLDSKFLEQVHQLYDDSFPMEIRQYLAQWLEKQDWEHAANDVSFATIRFHDLLSQLDDQYSRFSLENNFLLQHNIRKSKRNLQDNFQEDPIQMSMIIYSCLKEERKILENAQRFNQAQSGNIQSTVMLDKQKELDSKVRNVKDKVMCIEHEIKSLEDLQDEYDFKCKTLQNREHETNGVAKSDQKQEQLLLKKMYLMLDNKRKEVVHKIIELLNVTELTQNALINDELVEWKRRQQSACIGGPPNACLDQLQNWFTIVAESLQQVRQQLKKLEELEQKYTYEHDPITKNKQVLWDRTFSLFQQLIQSSFVVERQPCMPTHPQRPLVLKTGVQFTVKLRLLVKLQELNYNLKVKVLFDKDVNERNTVKGFRKFNILGTHTKVMNMEESTNGSLAAEFRHLQLKEQKNAGTRTNEGPLIVTEELHSLSFETQLCQPGLVIDLETTSLPVVVISNVSQLPSGWASILWYNMLVAEPRNLSFFLTPPCARWAQLSEVLSWQFSSVTKRGLNVDQLNMLGEKLLGPNASPDGLIPWTRFCKENINDKNFPFWLWIESILELIKKHLLPLWNDGCIMGFISKERERALLKDQQPGTFLLRFSESSREGAITFTWVERSQNGGEPDFHAVEPYTKKELSAVTFPDIIRNYKVMAAENIPENPLKYLYPNIDKDHAFGKYYSRPKEAPEPMELDGPKGTGYIKTELISVSEVHPSRLQTTDNLLPMSPEEFDEVSRIVGSVEFDSMMNTV

SEQ ID NO: 659 - protein, 155 aa, Homo sapiens
MSEDSKYVLIQMLWDNMKLHQDPGQPLYILWNAHTQKYPMVHLLQKSDNSFNQELLKSMVKSIKMNDVYGPMSQILETLNKCPHFKRQRSLYREILFLSLVALGRENIDIDAFDKEYKMAYDRLTPSQVKSTHNCDRPPSTGVMECRKTFGEPYL

SEQ ID NO: 660 - protein, 683 aa, Homo sapiens
MASGPGSQEREGLLIVKLEEDCAWSQELPPPDPGPSPEASHLRFRRFRFQEAAGPREALSRLQELCHGWLRPEMRTKEQILELLVLEQFLTILPQEIQSRVQELHPESGEEAVTLVEGMQRELGRLRQQVTNHGRGTEVLLEEPLPLETARESPSFKLEPMETERSPGPRLQELLGPSPQRDPQAVKERALSAPWLSLFPPEGNMEDKEMTGPQLPESLEDVAMYISQEEWGHQDPSKRALSRDTVQESYENVDSLESHIPSQEVPGTQVGQGGKLWDPSVQSCKEGLSPRGPAPGEEKFENLEGVPSVCSENIHPQVLLPDQARGEVPWSPELGRPHDRSQGDWAPPPEGGMEQALAGASSGRELGRPKELQPKKLHLCPLCGKNFSNNSNLIRHQRIHAAERLCMGVDCTEIFGGNPRFLSLHRAHLGEEAHKCLECGKCFSQNTHLTRHQRTHTGEKPYQCNICGKCFSCNSNLHRHQRTHTGEKPYKCPECGEIFAHSSNLLRHQRIHTGERPYKCPECGKSFSRSSHLVIHERTHERERLYPFSECGEAVSDSTPFLTNHGAHKAEKKLFECLTCGKSFRQGMHLTRHQRTHTGEKPYKCTLCGENFSHRSNLIRHQRIHTGEKPYTCHECGDSFSHSSNRIRHLRTHTGERPYKCSECGESFSRSSRLMSHQRTHTG

SEQ ID NO: 661 - protein, 157 aa, Homo sapiens
MAAVDIRDNLLGISWVDSSWIPILNSGSVLDYFSERSNPFYDRTCNNEVVKMQRLTLEHLNQMVGIEYILLHAQEPILFIIRKQQRQSPAQVIPLADYYIIAGVIYQAPDLGSVINSRVLTAVHGIQSAFDEAMSYCRYHPSKGYWWHFKDHEEQGK

SEQ ID NO: 662 - protein, 503 aa, Homo sapiens
MALAPERAAPRVLFGEWLLGEISSGCYEGLQWLDEARTCFRVPWKHFARKDLSEADARIFKAWAVARGRWPPSSRGGGPPPEAETAERAGWKTNFRCALRSTRRFVMLRDNSGDPADPHKVYALSRELCWREGPGTDQTEAEAPAAVPPPQGGPPGPFLAHTHAGLQAPGPLPAPAGDKGDLLLQAVQQSCLADHLLTASWGADPVPTKAPGEGQEGLPLTGACAGGPGLPAGELYGWAVETTPSPGPQPAALTTGEAAAPESPHQAEPYLSPSPSACTAVQEPSPGALDVTIMYKGRTVLQKVVGHPSCTFLYGPPDPAVRATDPQQVAFPSPAELPDQKQLRYTEELLRHVAPGLHLELRGPQLWARRMGKCKVYWEVGGPPGSASPSTPACLLPRNCDTPIFDFRVFFQELVEFRARQRRGSPRYTIYLGFGQDLSAGRPKEKSLVLVKLEPWLCRVHLEGTQREGVSSLDSSSLSLCLSSANSLYDDIECFLMELEQPA

SEQ ID NO: 663 - protein, 474 aa, Homo sapiens
MALAPERAAPRVLFGEWLLGEISSGCYEGLQWLDEARTCFRVPWKHFARKDLSEADARIFKAWAVARGRWPPSSRGGGPPPEAETAERAGWKTNFRCALRSTRRFVMLRDNSGDPADPHKVYALSRELCWREGPGTDQTEAEAPAAVPPPQGGPPGPFLAHTHAGLQAPGPLPAPAGDKGDLLLQAVQQSCLADHLLTASWGADPVPTKAPGEGQEGLPLTGACAGGEAAAPESPHQAEPYLSPSPSACTAVQEPSPGALDVTIMYKGRTVLQKVVGHPSCTFLYGPPDPAVRATDPQQVAFPSPAELPDQKQLRYTEELLRHVAPGLHLELRGPQLWARRMGKCKVYWEVGGPPGSASPSTPACLLPRNCDTPIFDFRVFFQELVEFRARQRRGSPRYTIYLGFGQDLSAGRPKEKSLVLVKLEPWLCRVHLEGTQREGVSSLDSSSLSLCLSSANSLYDDIECFLMELEQPA

SEQ ID NO: 664 - protein, 164 aa, Homo sapiens
MALAPERAAPRVLFGEWLLGEISSGCYEGLQWLDEARTCFRVPWKHFARKDLSEADARIFKAWAVARGRWPPSSRGGGPPPEAETAERAGWKTNFRCALRSTRRFVMLRDNSGDPADPHKVYALSRELCWREGPGTDQTEAEAPAAVPPPQAQGSLLGSCTGGQ

SEQ ID NO: 665 - protein, 516 aa, Homo sapiens
MPVPERPAAGPDSPRPGTRRAAPRVLFGEWLLGEISSGCYEGLQWLDEARTCFRVPWKHFARKDLSEADARIFKAWAVARGRWPPSSRGGGPPPEAETAERAGWKTNFRCALRSTRRFVMLRDNSGDPADPHKVYALSRELCWREGPGTDQTEAEAPAAVPPPQGGPPGPFLAHTHAGLQAPGPLPAPAGDEGDLLLQAVQQSCLADHLLTASWGADPVPTKAPGEGQEGLPLTGACAGGPGLPAGELYGWAVETTPSPGPQPAALTTGEAAAPESPHQAEPYLSPSPSACTAVQEPSPGALDVTIMYKGRTVLQKVVGHPSCTFLYGPPDPAVRATDPQQVAFPSPAELPDQKQLRYTEELLRHVAPGLHLELRGPQLWARRMGKCKVYWEVGGPPGSASPSTPACLLPRNCDTPIFDFRVFFRELVEFRARQRRGSPRYTIYLGFGQDLSAGRPKEKSLVLVKLEPWLCRVHLEGTQREGVSSLDSSSLSLCLSSANSLYDDIECFLMELEQPA

SEQ ID NO: 666 - protein, 462 aa, Homo sapiens
MQLRKMQTVKKEQASLDASSNVDKMMVLNSALTEVSEDSTTGEDVLLSEGSVGKNKSSACRRKREFIPDEKKDAMYWEKRRKNNEAAKRSREKRRLNDLVLENKLIALGEENATLKAELLSLKLKFGLISSTAYAQEIQKLSNSTAVYFQDYQTSKSNVSSFVDEHEPSMVSSSCISVIKHSPQSSLSDVSEVSSVEHTQESSVQGSCRSPENKFQIIKQEPMELESYTREPRDDRGSYTASIYQNYMGNSFSGYSHSPPLLQVNRSSSNSPGTSETDDGVVGKSSDGEDEQQVPKGPIHSPVELKHVHATVVKVPEVNSSALPHKLRIKAKAMQIKVEAFDNEFEATQKLSSPIDMTSKRHFELEKHSAPSMVHSSLTPFSVQVTNIQDWSLKSEHWHQKELSGKTQNSFKTGVVEMKDSGYKVSDPENLYLKQGIANLSAEVVSLKRLIATQPISASDSG

SEQ ID NO: 667 - protein, 780 aa, Homo sapiens; identical to SEQ ID NO: 3

SEQ ID NO: 668 - protein, 526 aa, Homo sapiens
MSLVEAISLWNEGVLAADKKDWKGALDAFSAVQDPHSRICFNIGCMYTILKNMTEAEKAFTRSINRDKHLAVAYFQRGMLYYQTEKYDLAIKDLKEALIQLRGNQLIDYKILGLQFKLFACEVLYNIAFMYAKKEEWKKAEEQLALATSMKSEPRHSKIDKAMECVWKQKLYEPVVIPVGKLFRPNERQVAQLAKKDYLGKATVVASVVDQDSFSGFAPLQPQAAEPPPRPKTPEIFRALEGEAHRVLFGFVPETKEELQVMPGNIVFVLKKGNDNWATVMFNGQKGLVPCNYLEPVELRIHPQQQPQEESSPQSDIPAPPSSKAPGKPQLSPGQKQKEEPKEVKLSVPMPYTLKVHYKYTVVMKTQPGLPYSQVRDMVSKKLELRLEHTKLSYRPRDSNELVPLSEDSMKDAWGQVKNYCLTLWCENTVGDQGFPDEPKESEKADANNQTTEPQLKKGSQVEALFSYEATQPEDLEFQEGDIILVLSKVNEEWLEGECKGKVGIFPKVFVEDCATTDLESTRREV

SEQ ID NO: 669 - protein, 165 aa, Homo sapiens
MKPLIWTWSDVEGQRPALLICTAAAGPTQGVKDLEEVPPSAASQSAQARCALGSWGYGKPFEPRSVKNIHSTPAYPDATMHRQLLAPVEGRMAETLNQKLHVANVLEDDPGYLPHVYSEEGECGGAPSLSSLASLEQELQPDLLDSLGSKATPFEEIYSESGVPS

SEQ ID NO: 670 - protein, 790 aa, Homo sapiens; identical to SEQ ID NO: 550

SEQ ID NO: 671 - protein, 273 aa, Homo sapiens
MSGSQSEVAPSPQSPRSPEMGRDLRPGSRVLLLLLLLLLVYLTQPGNGNEGSVTGSCYCGKRISSDSPPSVQFMNRLRKHLRAYHRCLYYTRFQLLSWSVCGGNKDPWVQELMSCLDLKECGHAYSGIVAHQKHLLPTSPPTSQASEGASSDIHTPAQMLLSTLQSTQRPTLPVGSLSSDKELTRPNETTIHTAGHSLAVGPEAGENQKQPEKNAGPTARTSATVPVLCLLAIIFILTAALSYVLCKRRRGQSPQSSPDLPVHYIPVAPDSNT

SEQ ID NO: 672 - protein, 177 aa, Homo sapiens [sequence omitted]

SEQ ID NO: 673 - protein, 654 aa, Homo sapiens
MKLSLVAAMLLLLSAARAEEEDKKEDVGTVVGIDLGTTYSCVGVFKNGRVEIIANDQGNRITPSYVAFTPEGERLIGDAAKNQLTSNPENTVFDAKRLIGRTWNDPSVQQDIKFLPFKVVEKKTKPYIQVDIGGGQTKTFAPEEISAMVLTKMKETAEAYLGKKVTHAVVTVPAYFNDAQRQATKDAGTIAGLNVMRIINEPTAAAIAYGLDKREGEKNILVFDLGGGTFDVSLLTIDNGVFEVVATNGDTHLGGEDFDQRVMEHFIKLYKKKTGKDVRKDNRAVQKLRREVEKAKRALSSQHQARIEIESFYEGEDFSETLTRAKFEELNMDLFRSTMKPVQKVLEDSDLKKSDIDEIVLVGGSTRIPKIQQLVKEFFNGKEPSRGINPDEAVAYGAAVQAGVLSGDQDTGDLVLLDVCPLTLGIETVGGVMTKLIPRNTVVPTKKSQIFSTASDNQPTVTIKVYEGERPLTKDNHLLGTFDLTGIPPAPRGVPQIEVTFEIDVNGILRVTAEDKGTGNKNKITITNDQNRLTPEEIERMVNDAEKFAEEDKKLKERIDTRNELESYAYSLKNQIGDKEKLGGKLSSEDKETMEKAVEEKIEWLESHQDADIEDFKAKKKELEEIVQPIISKLYGSAGPPPTGEEDTAEKDEL

SEQ ID NO: 674 - protein, 445 aa, Homo sapiens
MGGVGEPGPREGPAQPGAPLPTFCWEQIRAHDQPGDKWLVIERRVYDISRWAQRHPGGSRLIGHHGAEDATDAFRAFHQDLNFVRKFLQPLLIGELAPEEPSQDGPLNAQLVEDFRALHQAAEDMKLFDASPTFFAFLLGHILAMEVLAWLLIYLLGPGWVPSALAAFILAISQAQSWCLQHDLGHASIFKKSWWNHVAQKFVMGQLKGFSAHWWNFRHFQHHAKPNIFHKDPDVTVAPVFLLGESSVEYGKKKRRYLPYNQQHLYFFLIGPPLLTLVNFEVENLAYMLVCMQWADLLWAASFYARFFLSYLPFYGVPGVLLFFVAVRVLESHWFVWITQMNHIPKEIGHEKHRDWVSSQLAATCNVEPSLFTNWFSGHLNFQIEHHLFPRMPRHNYSRVAPLVKSLCAKHGLSYEVKPFLTALVDIVRSLKKSGDIWLDAYLHQ

SEQ ID NO: 675 - protein, 1153 aa, Homo sapiens [sequence omitted]

SEQ ID NO: 676 - protein, 1025 aa, Homo sapiens [sequence omitted]

SEQ ID NO: 677 - protein, 553 aa, Homo sapiens
MPVQLTTALRVVGTSLFALAVLGGILAAYVTGYQFIHTEKHYLSFGLYGAILGLHLLIQSLFAFLEHRRMRRAGQALKLPSPRRGSVALCIAAYQEDPDYLRKCLRSAQRISFPDLKVVMVVDGNRQEDAYMLDIFHEVLGGTEQAGFFVWRSNFHEAGEGETEASLQEGMDRVRDVVRASTFSCIMQKWGGKREVMYTAFKALGDSVDYIQVCDSDTVLDPACTIEMLRVLEEDPQVGGVGGDVQILNKYDSWISFLSSVRYWMAFNVERACQSYFGCVQCISGPLGMYRNSLLQQFLEDWYHQKFLGSKCSFGDDRHLTNRVLSLGYRTKYTARSKCLTETPTKYLRWLNQQTRWSKSYFREWLYNSLWFHKHHLWMTYESVVTGFFPFFLIATVIQLFYRGRIWNILLFLLTVQLVGIIKATYACFLRGNAEMIFMSLYSLLYMSSLLPAKIFAIATINKSGWGTSGRKTIVVNFIGLIPVSIWVAVLLGGLAYTAYCQDLFSETELAFLVSGAILYGCYWVALLMLYLAIIARRCGKKPEQYSLAFAEV

SEQ ID NO: 678 - protein, 281 aa, Homo sapiens
MPVQLTTALRVVGTSLFALAVLGGILAAYVTGYQFIHTEKHYLSFGLYGAILGLHLLIQSLFAFLEHRRMRRAGQALKLPSPRRGSVALCIAAYQEDPDYLRKCLRSAQRISFPDLKVVMVVDGNRQEDAYMLDIFHEVLGGTEQAGFFVWRSNFHEAGEGETEASLQEGMDRVRDVVRASTFSCIMQKWGGKREVMYTAFKALGDSVDYIQVCDSDTVLDPACTIEMLRVLEEDPQVGGVGGDVQPPGKGMAVEDDQVQAAQVRATEAWSVHQRHVSREQ

SEQ ID NO: 679 - protein, 192 aa, Homo sapiens
MGNISSNISAFQSLHIVMLGLDSAGKTTVLYRLKFNEFVNTVPTIGFNTEKIKLSNGTAKGISCHFWDVGGQEKLRPLWKSYSRCTDGIIYVVDSVDVDRLEEAKTELHKVTKFAENQGTPLLVIANKQDLPKSLPVAEIEKQLALHELIPATTYHVQPACAIIGEGLTEGMDKLYEMILKRRKSLKQKKKR

SEQ ID NO: 680 - protein, 925 aa, Homo sapiens [sequence omitted]

SEQ ID NO: 681 - protein, 594 aa, Homo sapiens
MEMCDQRHNITMCPLCDKTCSYWKMSSACATARASHLFDNPATVFFSVFMALWAATFMEHWKRKQMRLNYRWDLTGFEEEEEAVKDHPRAEYEARVLEKSLKKESRNKETDKVKLTWRDRFPAYLTNLVSIIFMIAVTFAIVLGVIIYRISMAAALAMNSSPSVRSNIRVTVTATAVIINLVVIILLDEVYGCIARWLTKIEVPKTEKSFEERLIFKAFLLKFVNSYTPIFYVAFFKGRFVGRPGDYVYIFRSFRMEECAPGGCLMELCIQLSIIMLGKQLIQNNLFEIGIPKMKKLIRYLKLKQQSPPDHEECVKRKQRYEVDYNLEPFAGLTPEYMEMIIQFGFVTLFVASFPLAPLFALLNNIIEIRLDAKKFVTELRRPVAVRAKDIGIWYNILRGIGKLAVIINAFVISFTSDFIPRLVYLYMYSKNGTMHGFVNHTLSSFNVSDFQNGTAPNDPLDLGYEVQICRYKDYREPPWSENKYDISKDFWAVLAARLAFVIVFQNLVMFMSDFVDWVIPDIPKDISQQIHKEKVLMVELFMREEQDKQQLLETWMEKERQKDEPPCNHHNTKACPDSLGSPAPSHAYHGGVL

SEQ ID NO: 682 - protein, 227 aa, Homo sapiens
MGGTTSTRRVTFEADENENITVVKGIRLSENVIDRMKESSPSGSKSQRYSGAYGASVSDEELKRRVAEELALEQAKKESEDQKRLKQAKELDRERAAANEQLTRAILRERICSEEERAKAKHLARQLEEKDRVLKKQDAFYKEQLARLEERSSEFYRVTTEQYQKAAEEVEAKFKRYESHPVCADLQAKILQCYRENTHQTLKCSALATQYMHCVNHAKQSMLEKGG

SEQ ID NO: 683 - protein, 126 aa, Homo sapiens
MPIIVLILVSLLSQLMVSNPPYSLYPRSGTGQTIKMQTENLGVVYYVNKDFKNEYKGMLLQKVEKSVEEDYVTNIRNNCWKERQQKTDMQYAAKVYRDDRLRRKADALSMDNCKELERLTSLYKGG

SEQ ID NO: 684 - protein, 701 aa, Homo sapiens
MAQAGVVGEVTQVLCAAGGALELPELRRRLRMGLSADALERLLRQRGRFVVAVRAGGAAAAPERVVLAASPLRLCRAHQGSKPGCVGLCAQLHLCRFMVYGACKFLRAGKNCRNSHSLTTEHNLSVLRTHGVDHLSYNELCQLLFQNDPWLLPEICQHYNKGDGPHGSCAFQKQCIKLHICQYFLQGECKFGTSCKRSHDFSNSENLEKLEKLGMSSDLVSRLPTIYRNAHDIKNKSSAPSRVPPLFVPQGTSERKDSSGSVSPNTLSQEEGDQICLYHIRKSCSFQDKCHRVHFHLPYRWQFLDRGKWEDLDNMELIEEAYCNPKIERILCSESASTFHSHCLNFNAMTYGATQARRLSTASSVTKPPHFILTTDWIWYWSDEFGSWQEYGRQGTVHPVTTVSSSDVEKAYLAYCTPGSDGQAATLKFQAGKHNYELDFKAFVQKNLVYGTTKKVCRRPKYVSPQDVTTMQTCNTKFPGPKSIPDYWDSSALPDPGFQKITLSSSSEEYQKVWNLFNRTLPFYFVQKIERVQNLALWEVYQWQKGQMQKQNGGKAVDERQLFHGTSAIFVDAICQQNFDWRVCGVHGTSYGKGSYFARDAAYSHHYSKSDTQTHTMFLARVLVGEFVRGNASFVRPPAKEGWSNAFYDSCVNSVSDPSIFVIFEKHQVYPEYVIQYTTSSKPSVTPSILLALGSLFSSRQ

SEQ ID NO: 685 - protein, 326 aa, Homo sapiens
MQEEPLPQGNDPEPSGDSPLGLCQSECMEMSEVFDDASDQDSTDKPWRPYYNYKPKKKSRQLKKMRKVNWRKEHGNRSPSHKCKYPAELDCAVGKAPQDKPFEEEETKEMPKLQCELCDGDKAVGAGNQGRPHRHLTSRPYACELCAKQFQSPSTLKMHMRCHTGEKPYQCKTCGRCFSVQGNLQKHERIHLGLKEFVCQYCNKAFTLNETLKIHERIHTGEKRYHCQFCFQRFLYLSTKRNHEQRHIREHNGKGYACFQCPKICKTAAALGMHQKKHLFKSPSQQEKIGDVCHENSNPLENQHFIGSEDNDQKDNIQTGVENVVL

SEQ ID NO: 686 - protein, 105 aa, Homo sapiens
MSIYFPIHCPDYLRSAKMTEVMMNTQPMEEIGLSPRKDGLSYQIFPDPSDFDRRCKLKDRLPSIVVEPTEGEVESGELRWPPEEFLVQEDEQDNCEETAKENKEQ

SEQ ID NO: 687 - protein, 379 aa, Homo sapiens
MQMSEKKAYMLMHETILQKKDEFPPSPRFILRVRRSRLVKDALRQLSQAEATDFCKVLVVEFINEICPESGGVSSEFFHCMFEEMTKPEYGMFMYPEMCSCMWFPAKPKPEKKRYFLFGMLCGLSLFNLNVANLPFPLALYKKLLDQKPSLEDLKELSPRLGKSLQEVLDDAADDIGDALCIRFSIHWDQNDVDLIPNGISIPVDQTNKRDYVSKYIDYIFNVSVKAVYEEFQRGFYRVCEKEILRHFYPEELMTAIIGNTDYDWKQFEQNSKYEQGYQKSHPTIQLFWKAFHKLTLDEKKKFLFFLTGRDRLHARGIQKMEIVFRCPETFSERDHPTSITCHNILSLPKYSTMERMEEALQVAINNNRGFVSPMLTQS

SEQ ID NO: 688 - protein, 122 aa, Homo sapiens; identical to SEQ ID NO: 595

SEQ ID NO: 689 - protein, 586 aa, Homo sapiens
MALEIHMSDPMCLIENFNEQLKVNQEALEILSAITQPVVVVAIVGLYRTGKSYLMNKLAGKNKGFSVASTVQSHTKGIWIWCVPHPNWPNHTLVLLDTEGLGDVEKADNKNDIQIFALALLLSSTFVYNTVNKIDQGAIDLLHNVTELTDLLKARNSPDLDRVEDPADSASFFPDLVWTLRDFCLGLEIDGQLVTPDEYLENSLRPKQGSDQRVQNFNLPRLCIQKFFPKKKCFIFDLPAHQKKLAQLETLPDDELEPEFVQQVTEFCSYIFSHSMTKTLPGGIMVNGSRLKNLVLTYVNAISSGDLPCIENAVLALAQRENSAAVQKAIAHYDQQMGQKVQLPMETLQELLDLHRTSEREAIEVFMKNSFKDVDQSFQKELETLLDAKQNDICKRNLEASSDYCSALLKDIFGPLEEAVKQGIYSKPGGHNLFIQKTEELKAKYYREPRKGIQAEEVLQKYLKSKESVSHAILQTDQALTETEKKKKEAQVKAEAEKAEAQRLAAIQRQNEQMMQERERLHQEQVRQMEIAKQNWLAEQQKMQEQQMQEQAAQLSTTFQAQNRSLLSELQHAQRTVNNDDPCVLL

SEQ ID NO: 690 - protein, 1093 aa, Homo sapiens
MAGAAGLTAEVSWKVLERRARTKRSGSVYEPLKSINLPRPDNETLWDKLDHYYRIVKSTLLLYQSPTTGLFPTKTCGGDQKAKIQDSLYCAAGAWALALAYRRIDDDKGRTHELEHSAIKCMRGILYCYMRQADKVQQFKQDPRPTTCLHSVFNVHTGDELLSYEEYGHLQINAVSLYLLYLVEMISSGLQIIYNTDEVSFIQNLVFCVERVYRVPDFGVWERGSKYNNGSTELHSSSVGLAKAALEAINGFNLFGNQGCSWSVIFVDLDAHNRNRQTLCSLLPRESRSHNTDAALLPCISYPAFALDDEVLFSQTLDKVVRKLKGKYGFKRFLRDGYRTSLEDPNRCYYKPAEIKLFDGIECEFPIFFLYMMIDGVFRGNPKQVQEYQDLLTPVLHHTTEGYPVVPKYYYVPADFVEYEKNNPGSQKRFPSNCGRDGKLFLWGQALYIIAKLLADELISPKDIDPVQRYVPLKDQRNVSMRFSNQGPLENDLVVHVALIAESQRLQVFLNTYGIQTQTPQQVEPIQIWPQQELVKAYLQLGINEKLGLSGRPDRPIGCLGTSKIYRILGKTVVCYPIIFDLSDFYMSQDVFLLIDDIKNALQFIKQYWKMHGRPLFLVLIREDNIRGSRFNPILDMLAALKKGIIGGVKVHVDRLQTLISGAVVEQLDFLRISDTEELPEFKSFEELEPPKHSKVKRQSSTPSAPELGQQPDVNISEWKDKPTHEILQKLNDCSCLASQAILLGILLKREGPNFITKEGTVSDHIERVYRRAGSQKLWLAVRYGAAFTQKFSSSIAPHITTFLVHGKQVTLGAFGHEEEVISNPLSPRVIQNIIYYKCNTHDEREAVIQQELVIHIGWIISNNPELFSGMLKIRIGWIIHAMEYELQIRGGDKPALDLYQLSPSEVKQLLLDILQPQQNGRCWLNRRQIDGSLNRTPTGFYDRVWQILERTPNGIIVAGKHLPQQPTLSDMTMYEMNFSLLVEDTLGNIDQPQYRQIVVELLMVVSIVLERNPELEFQDKVDLDRLVKEAFNEFQKDQSRLKEIEKQDDMTSFYNTPPLGKRGTCSYLTKAVMNLLLEGEVKPNNDDPCLIS

SEQ ID NO: 691 - protein, 1103 aa, Homo sapiens; identical to SEQ ID NO: 604

SEQ ID NO: 692 - protein, 357 aa, Homo sapiens
MARENGESSSSWKKQAEDIKKIFEFKETLGTGAFSEVVLAEEKATGKLFAVKCIPKKALKGKESSIENEIAVLRKIKHENIVALEDIYESPNHLYLVMQLVSGGELFDRIVEKGFYTEKDASTLIRQVLDAVYYLHRMGIVHRDLKPENLLYYSQDEESKIMISDFGLSKMEGKGDVMSTACGTPGYVAPEVLAQKPYSKAVDCWSIGVIAYILLCGYPPFYDENDSKLFEQILKAEYEFDSPYWDDISDSAKDFIRNLMEKDPNKRYTCEQAARHPWIAGDTALNKNIHESVSAQIRKNFAKSKWRQAFNATAVVRHMRKLHLGSSLDSSNASVSSSLSLASQKDCAYVAKPESLS

SEQ ID NO: 693 - protein, 398 aa, Homo sapiens; identical to SEQ ID NO: 639

SEQ ID NO: 694 - protein, 196 aa, Homo sapiens
MADGQMPFSCHYPSRLRRDPFRDSPLSSRLLDDGFGMDPFPDDLTASWPDWALPRLSSAWPGTLRSGMVPRGPTATARFGVPAEGRTPPPFPGEPWKVCVNVHSFKPEELMVKTKDGYVEVSGKHEEKQQEGGIVSKNFTKKIQLPAEVDPVTVFASLSPEGLLIIEAPQVPPYSTFGESSFNNELPQDSQEVTCT

SEQ ID NO: 695 - protein, 211 aa, Homo sapiens
MANAGLQLLGFILAFLGWIGAIVSTALPQWRIYSYAGDNIVTAQAMYEGLWMSCVSQSTGQIQCKVFDSLLNLSSTLQATRALMVVGILLGVIAIFVATVGMKCMKCLEDDEVQKMRMAVIGGAIFLLAGLAILVATAWYGNRIVQEFYDPMTPVNARYEFGQALFTGWAAASLCLLGGALLCCSCPRKTTSYPTPRPYPKPAPSSGKDYV

SEQ ID NO: 696 - protein, 479 aa, Homo sapiens
MARAAALLPSRSPPTPLLWPLLLLLLLETGAQDVRVQVLPEVRGQLGGTVELPCHLLPPVPGLYISLVTWQRPDAPANHQNVAAFHPKMGPSFPSPKPGSERLSFVSAKQSTGQDTEAELQDATLALHGLTVEDEGNYTCEFATFPKGSVRGMTWLRVIAKPKNQAEAQKVTFSQDPTTVALCISKEGRPPARISWLSSLDWEAKETQVSGTLAGTVTVTSRFTLVPSGRADGVTVTCKVEHESFEEPALIPVTLSVRYPPEVSISGYDDNWYLGRTDATLSCDVRSNPEPTGYDWSTTSGTFPTSAVAQGSQLVIHAVDSLFNTTFVCTVTNAVGMGRAEQVIFVRETPRASPRDVGPLVWGAVGGTLLVLLLLAGGSLAFILLRVRRRRKSPGGAGGGASGDGGFYDPKAQVLGNGDPVFWTPVVPGPMEPDGKDEEEEEEEEKAEKGLMLPPPPALEDDMESQLDGSLISRRAVYV

SEQ ID NO: 697 - protein, 1053 aa, Homo sapiens
MWQPRRPWPRVPWRWALALLALVGAGLCHAGPQPGYPARPSARNKNWCAYIVNKNVSCSVLEGSESFIQAQYNCAWNQMPCPSALVYRVNFRPRYVTRYKTVTQLEWRCCPGFRGGDCQEGPKDPVKTLRPTPARPRNSLKKATDNEPSQFSEPRKTLSPTGTAQPSWGVDPKEGPQELQEKKIQVLEEKVLRLTRTVLDLQSSLAGVSENLKHATQDDASRTRAPGLSSQHPKPDTTVSGDTETGQSPGVFNTKESGMKDIKSELAEVKDTLKNKSDKLEELDGKVKGYEGQLRQLQEAAQGPTVTMTTNELYQAYVDSKIDALREELMEGMDRKLADLKNSCEYKLTGLQQQCDDYGSSYLGVIELIGEKETSLRKEINNLRARLQEPSAQANCCDSEKNGDIGQQIKTLDQKIERVAEATRMLNGRLDNEFDRLIVPEPDVDFDAKWNELDARINVTEKNAEEHCFYIEETLRGAINGEVGDLKQLVDQKIQSLEDRLGSVLLQMTNNTGAELSPPGAAALPGVSGSGDERVMMELNHLKDGVQVVEDICLLNIQGKPHGMEGALPNREDRAVRDSLHLLKSLNDTMHRKFQETEQTIQKLQQDFSFLYSQLNHTENDVTHLQKEMSNCRAGENAGMGRFTKVGEQERTVDTLPSPQHPVAHCCSQLEERWQRLQSQVISELDACKECTQGVQREVSMVEGRVSHMEKTCSKLDSISGNLQRIKEGLNKHVSSLWNCVRQMNGTLRSHSRDISGLKNSVQQFYSHVFQISTDLQDLVKFQPSAKAPSPPPPAEAPKEPLQPEPAPPRPSGPATAEDPGRRPVLPQRPPEERPPQPPGSTGVIAETGQAGPPAGAGVSGRGLPRGVDGQTGSGTVPGAEGFAGAPGYPKSPPVASPGAPVSSLVSFSAGLTQKPFPSDGGVVLFNKVLVNDGDVYNPSTGVFTAPYDGRYLITATLTPERDAYVEAVLSVSNASVAQLHTAGYRREFLEYHRPPGALHTCGGPGAFHLIVHLKAGDAVNVVVTGGKLAHTDFDEMYSTFSGVFLYPFLSHL

SEQ ID NO: 698 - protein, 130 aa, Homo sapiens
MAPKVKKEAPGPPKAEAKAKALKAKKVVLKGVHGHKKKKIRMSPTFQRPKTLRLWRPPRYPRKTTPRRNKLDHYAIIKFPLTTEFAMKKIKDNNTLVFTVDVKANKHQIKQAVKKLCDIDGAKVNTLMER

SEQ ID NO: 699 - protein, 1052 aa, Homo sapiens
MAGMDSGNLKTARLWRDAALRARKLRSNLRQLTLTAAGACPGAGADALESPASPQLVLPANLGDIEALNLGNNGLEEVPEGLGSALGSLRVLVLRRNRFARLPPAVAELGHHLTELDVSHNRLTALGAEVVSALRELRKLNLSHNQLPALPAQLGALAHLEELDVSFNRLAHLPDSLSCLSRLRTLDVDHNQLTAFPRQLLQLVALEELDVSSNRLRGLPEDISALRALKILWLSGAELGTLPAGFCELASLESLMLDNNGLQALPAQFSCLQRLKMLNLSSNLFEEFPAALLPLAGLEELYLSRNQLTSVPSLISGLGRLLTLWLDNNRIRYLPDSIVELTGLEELVLQGNQIAVLPDHFGQLSRVGLWKIKDNPLIQPPYEVCMKGIPYIAAYQKELAHSQPAVQPRLKLLLMGHKAAGKTLLRHCLTEERVEGCPGGGDKEKCYPPSPPPVSKGIEVTSWTADASRGLRFIVYDLAGDESYEVIQPFFLSPGALYVLVVNLATYEPRHFPTTVGSFLHRVGARVPNAVVCIVGTHADLCGERELEEKCLDIHRQIALQEKHDAEGLSRLAKVVDEALARDFELRSASPHAAYYGVSDKNLRRRKAHFQYLLNHRLQILSPVLPVSCRDPRHLRRLRDKLLSVAEHREIFPNLHRVLPRSWQVLEELHFQPPQAQRLWLSWWDSARLGLQAGLTEDRLQSALSYLHESGKLLYFEDSPALKEHVFHNLTRLIDILNVFFQRDPSLLLHKLLLGTSGEGKAEGESSPPMARSTPSQELLRATQLHQYVEGFLLHGLLPAHVIRLLLKPHVQAQQDLQLLLELLEKMGLCYCLNKPKGKPLNGSTAWYKFPCYVQNEVPHAEAWINGTNLAGQSFVAEQLQIEYSFPFTFPPGLFARYSVQINSHVVHRSDGKFQIFAYRGKVPVVVSYRPARGVLQPDTLSIASHASLPNIWTAWQAITPLVEELNVLLQEWPGLHYTVHILCSKCLKRGSPNPHAFPGELLSQPRPEGVAEIICPKNGSERVNVALVYPPTPTVISPCSKKNVGEKHRNQ

SEQ ID NO: 700 - protein, 854 aa, Homo sapiens
MDFSMVAGAAAYNEKSGRITSLSLLFQKVFAQIFPQWRKGNTEECLPYKCSETGALGENYSWQIPINHNDFKILKNNERQLCEVLQNKFGCISTLVSPVQEGNSKSLQVFRKMLTPRIELSVWKDDLTTHAVDAVVNAANEDLLHGGGLALALVKAGGFEIQEESKQFVARYGKVSAGEIAVTGAGRLPCKQIIHAVGPRWMEWDKQGCTGKLQRAIVSILNYVIYKNTHIKTVAIPALSSGIFQFPLNLCTKTIVETIRVSLQGKPMMSNLKEIHLVSNEDPTVAAFKAASEFILGKSELGQETTPSFNAMVVNNLTLQIVQGHIEWQTADVIVNSVNPHDITVGPVAKSILQQAGVEMKSEFLATKAKQFQRSQLVLVTKGFNLFCKYIYHVLWHSEFPKPQILKHAMKECLEKCIEQNITSISFPALGTGNMEIKKETAAEILFDEVLTFAKDHVKHQLTVKFVIFPTDLEIYKAFSSEMAKRSKMLSLNNYSVPQSTREEKRENGLEARSPAINLMGFNVEEMCEAHAWIQRILSLQNHHIIENNHILYLGRKEHDILSQLQKTSSVSITEIISPGRTELEIEGARADLIEVVMNIEDMLCKVQEEMARKKERGLWRSLGQWTIQQQKTQDEMKENIIFLKCPVPPTQELLDQKKQFEKCGLQVLKVEKIDNEVLMAAFQRKKKMMEEKLHRQPVSHRLFQQVPYQFCNVVCRVGFQRMYSTPCDPKYGAGIYFTKNLKNLAEKAKKISAADKLIYVFEAEVLTGFFCQGHPLNIVPPPLSPGAIDGHDSVVDNVSSPETFVIFSGMQAIPQYLWTCTQEYVQSQDYSSGPMRPFAQHPWRGFASGSPVD

SEQ ID NO: 701 - protein, 626 aa, Homo sapiens; identical to SEQ ID NO: 584

SEQ ID NO: 702 - protein, 261 aa, Homo sapiens
MSSEPPPPYPGGPTAPLLEEKSGAPPTPGRSSPAVMQPPPGMPLPPADIGPPPYEPPGHPMPQPGFIPPHMSADGTYMPPGFYPPPGPHPPMGYYPPGPYTPGPYPGPGGHTATVLVPSGAATTVTVLQGEIFEGAPVQTVCPHCQQAITTKISYEIGLMNFVLGFFCCFMGCDLGCCLIPCLINDFKDVTHTCPSCKATSTRTSACANGAGTRDSPACQSGPLCFAPCAQWSLSRSHLGLGAVPPSPRSPVLFTLPYLSR

SEQ ID NO: 703 - protein, 138 aa, Homo sapiens
MISLTDTQKIGMGLTGFGVFFLFFGMILFFDKALLAIGNVLFVAGLAFVIGLERTFRFFFQKHKMKATGFFLGGVFVVLIGWPLIGMIFEIYGFFLLFRGFFPVVVGFIRRVPVLGSLLNLPGIRSFVDKVGESNNMV

SEQ ID NO: 704 - protein, 425 aa, Homo sapiens
MGEDAAQAEKFQHPGSDMRQEKPSSPSPMPSSTPSPSLNLGNTEEAIRDNSQVNAVTVLTLLDKLVNMLDAVQENQHKMEQRQISLEGSVKGIQNDLTKLSKYQASTSNTVSKLLEKSRKVSAHTRAVKERMDRQCAQVKRLENNHAQLLRRNHFKVLIFQEENEIPASVFVKQPVSGAVEGKEELPDENKSLEETLHTVDLSSDDDLPHDEEALEDSAEEKVEESRAEKIKRSSLKKVDSLKKAFSRQNIEKKMNKLGTKIVSVERREKIKKSLTSNHQKISSGKSSPFKVSPLTFGRKKVREGESHAENETKSEDLPSSEQMPNDQEEESFAEGHSEASLASALVEGEIAEEAAEKATSRGSNSGMDSNIDLTIVEDEEEESVALEQAQKVRYEGSYALTSEEAERSDGDPVQPAVLQVHQTS

SEQ ID NO: 705 - protein, 270 aa, Homo sapiens
MARFALTVVRHGETRFNKEKIIQGQGVDEPLSETGFKQAAAAGIFLNNVKFTHAFSSDLMRTKQTMHGILERSKFCKDMTVKYDSRLRERKYGVVEGKALSELRAMAKAAREECPVFTPPGGETLDQVKMRGIDFFEFLCQLILKEADQKEQFSQGSPSNCLETSLAEIFPLGKNHSSKVNSDSGIPGLAASVLVVSHGAYMRSLFDYFLTDLKCSLPATLSRSELMSVTPNTGMSLFIINFEEGREVKPTVQCICMNLQDHLNGLTETR

SEQ ID NO: 706 - protein, 601 aa, Homo sapiens
MAQKKYLQAKLTQFLREDRIQLWKPPYTDENKKVGLALKDLAKQYSDRLECCENEVEKVIEEIRCKAIERGTGNDNYRTTGIATIEVFLPPRLKKDRKNLLETRLHITGRELRSKIAETFGLQENYIKIVINKKQLQLGKTLEEQGVAHNVKAMVLELKQSEEDARKNFQLEEEEQNEAKLKEKQIQRTKRGLEILAKRAAETVVDPEMTPYLDIANQTGRSIRIPPSERKALMLAMGYHEKGRAFLKRKEYGIALPCLLDADKYFCECCRELLDTVDNYAVLQLDIVWCYFRLEQLECLDDAEKKLNLAQKCFKNCYGENHQRLVHIKGNCGKEKVLFLRLYLLQGIRNYHSGNDVEAYEYLNKARQLFKELYIDPSKVDNLLQLGFTAQEARLGLRACDGNVDHAATHITNRREELAQIRKEEKEKKRRRLENIRFLKGMGYSTHAAQQILLSNPQMWWLNDSNPETDNRQESPSQENIDRLVYMGFDALVAEAALRVFRGNVQLAAQTLAHNGGSLPPELPLSPEDSLSPPATSPSDSAGTSSASTDEDMETEAVNEILEDIPEHEEDYLDSTLEDEEIIIAEYLSYVENRKSATKKN

SEQ ID NO: 707 - protein, 274 aa, Homo sapiens
MRPLAGGSRWACWLTRCLISCFDINVQGRLLVKLRPKPTANTTCPGLLKVVFVVFASLCAWYSGYLLAELIPDAPLSSAAYSIRSIGERPVLKAPVPKRQKCDHWTPCPSDTYAYRLLSGGGRSKYAKICFEDNLLMGEQLGNVARGINIAIVNYVTGNVTATRCFDMYEGDNSGPMTKFIQSAAPKSLLFMVTYDDGSTRLNNDAKNAIEALGSKEIRNMKFRSSWVFIAAKGLELPSEIQREKINHSDAKNNRYSGWPAEIQIEGCIPKERS

SEQ ID NO: 708 - protein, 504 aa, Homo sapiens
MEATGTWALLLALALLLLLTLALSGTRARGHLPPGPTPLPLLGNLLQLRPGALYSGLMRLSKKYGPVFTIYLGPWRPVVVLVGQEAVREALGGQAEEFSGRGTVAMLEGTFDGHGVFFSNGERWRQLRKFTMLALRDLGMGKREGEELIQAEARCLVETFQGTEGRPFDPSLLLAQATSNVVCSLLFGLRFSYEDKEFQAVVRAAGGTLLGVSSQGGQTYEMFSWFLRPLPGPHKQLLHHVSTLAAFTVRQVQQHQGNLDASGPARDLVDAFLLKMAQEEQNPGTEFTNKNMLMTVIYLLFAGTMTVSTTVGYTLLLLMKYPHVQKWVREELNRELGAGQAPSLGDRTRLPYTDAVLHEAQRLLALVPMGIPRTLMRTTRFRGYTLPQGTEVFPLLGSILHDPNIFKHPEEFNPDRFLDADGRFRKHEAFLPFSLGKRVCLGEGLAKAELFLFFTTILQAFSLESPCPPDTLSLKPTVSGLFNIPPAFQLQVRPTDLHSTTQTR

SEQ ID NO: 709 - protein, 211 aa, Homo sapiens; identical to SEQ ID NO: 641

SEQ ID NO: 710 - protein, 372 aa, Homo sapiens
MSKAFGLLRQICQSILAESSQSPADLEEKKEEDSNMKREQPRERPRAWDYPHGLVGLHNIGQTCCLNSLIQVFVMNVDFTRILKRITVPRGADEQRRSVPFQMLLLLEKMQDSRQKAVRPLELAYCLQKCNVPLFVQHDAAQLYLKLWNLIKDQITDVHLVERLQALYTIRVKDSLICVDCAMESSRNSSMLTLPLSLFDVDSKPLKTLEDALHCFFQPRELSSKSKCFCENCGKKTRGKQVLKLTHLPQTLTIHLMRFSIRNSQTRKICHSLYFPQSLDFSQILPMKRESCDAEEQSGGQYELFAVIAHVGMADSGHYCVYIRNAVDGKWSCFNDSNICLVSWEDIQCTYGNPNYHWQETAYLLVYMKMEC

SEQ ID NO: 711 - protein, 258 aa, Homo sapiens
MDTPLPRPRPLLAVERTGQRPLWAPSLELPKPVMQPLPAGAFLEEVAEGTPAQTESEPKVLDPEEDLLCIAKTFSYLRESGWYWGSITASEARQHLQKMPEGTFLVRDSTHPSYLFTLSVKTTRGPTNVRIEYADSSFRLDSNCLSRPRILAFPDVVSLVQHYVASCTADTRSDSPDPAPTPALPMPKEDAPSDPALPAPPPATAVHLKLVQPFVRRSSARSLQHLCRLVINRLVADVDCLPLPRRMADYLRQYPFQL

SEQ ID NO: 712 - protein, 535 aa, Homo sapiens
MFSWLGTDDRRRKDPEVFQTVSEGLKKLYKSKLLPLEEHYRFHEFHSPALEDADFDNKPMVLLVGQYSTGKTTFIRYLLEQDFPGMRIGPEPTTDSFIAVMQGDMEGIIPGNALVVDPKKPFRKLNAFGNAFLNRFVCAQLPNPVLESISVIDTPGILSGEKQRISRGYDFAAVLEWFAERVDRIILLFDAHKLDISDEFSEVIKALKNHEDKMRVVLNKADQIETQQLMRVYGALMWSLGKIVNTPEVIRVYIGSFWSHPLLIPDNRKLFEAEEQDLFRDIQSLPRNAALRKLNDLIKRARLAKVHAYIISSLKKEMPSVFGKDNKKKELVNNLAEIYGRIEREHQISPGDFPNLKRMQDQLQAQDFSKFQPLKSKLLEVVDDMLAHDIAQLMVLVRQEESQRPIQMVKGGAFEGTLHGPFGHGYGEGAGEGIDDAEWVVARDKPMYDEIFYTLSPVDGKITGANAKKEMVRSKLPNSVLGKIWKLADIDKDGMLDDDEFALANHLIKVKLEGHELPNELPAHLLPPSKRKVAE

SEQ ID NO: 713 - protein, 422 aa, Homo sapiens [sequence omitted]

SEQ ID NO: 714 - protein, 503 aa, Homo sapiens; identical to SEQ ID NO: 662

SEQ ID NO: 715 - protein, 474 aa, Homo sapiens; identical to SEQ ID NO: 663

SEQ ID NO: 716 - protein, 164 aa, Homo sapiens; identical to SEQ ID NO: 664

SEQ ID NO: 717 - protein, 516 aa, Homo sapiens; identical to SEQ ID NO: 665

SEQ ID NO: 718 - protein, 470 aa, Homo sapiens
MAVSDALLPSFSTFASGPAGREKTLRQAGAPNNRWREELSHMKRLPPVLPGRPYDLAAATVATDLESGGAGAACGGSNLAPLPRRETEEFNDLLDLDFILSNSLTHPPESVAATVSSSASASSSSSPSSSGPASAPSTCSFTYPIRAGNDPGVAPGGTGGGLLYGRESAPPPTAPFNLADINDVSPSGGFVAELLRPELDPVYIPPQQPQPPGGGLMGKFVLKASLSAPGSEYGSPSVISVSKGSPDGSHPVVVAPYNGGPPRTCPKIKQEAVSSCTHLGAGPPLSNGHRPAAHNFPLGRQLPSRSTPTLGFEEVLSSRECHPALPLPPGFHPHPGPNYPSFLPDQMQPQVPPLHYQELMPPGSCMPEEPKPKRGRRSWPRKRTATHTCDYAGCGKTYTKSSHLKAHLRTHTGEKPYHCDWDGCGWKFARSDELTRHYRKHTGHRPFQCQKCDRAFSRSDHLALHMKRHF

SEQ ID NO: 719 - protein, 834 aa, Homo sapiens
MKYKNLMARALYDNVPECAEELAFRKGDILTVIEQNTGGLEGWWLCSLHGRQGIVPGNRVKLLIGPMQETASSHEQPASGLMQQTFGQQKLYQVPNPQAAPRDTIYQVPPSYQNQGIYQVPTGHGTQEQEVYQVPPSVQRSIGGTSGPHVGKKVITPVRTGHGYVYEYPSRYQKDVYDIPPSHTTQGVYDIPPSSAKGPVFSVPVGEIKPQGVYDIPPTKGVYAIPPSACRDEAGLREKDYDFPPPMRQAGRPDLRPEGVYDIPPTCTKPAGKDLHVKYNCDIPGAAEPVARRHQSLSPNHPPPQLGQSVGSQNDAYDVPRGVQFLEPPAETSEKANPQERDGVYDVPLHNPPDAKGSRDLVDGINRLSFSSTGSTRSNMSTSSTSSKESSLSASPAQDKRLFLDPDTAIERLQRLQQALEMGVSSLMALVTTDWRCYGYMERHINEIRTAVDKVELFLKEYLHFVKGAVANAACLPELILHNKMKRELQRVEDSHQILSQTSHDLNECSWSLNILAINKPQNKCDDLDRFVMVAKTVPDDAKQLTTTINTNAEALFRPGPGSLHLKNGPESIMNSTEYPHGGSQGQLLHPGDHKAQAHNKALPPGLSKEQAPDCSSSDGSERSWMDDYDYVHLQGKEEFERQQKELLEKENIMKQNKMQLEHHQLSQFQLLEQEITKPVENDISKWKPSQSLPTTNSGVSAQDRQLLCFYYDQCETHFISLLNAIDALFSCVSSAQPPRIFVAHSKFVILSAHKLVFIGDTLTRQVTAQDIRNKVMNSSNQLCEQLKTIVMATKMAALHYPSTTALQEMVHQVTDLSRNAQLFKRSLLEMATF

SEQ ID NO: 720 - protein, 281 aa, Homo sapiens
MGSRGQGLLLAYCLLLAFASGLVLSRVPHVQGEQQEWEGTEELPSPPDHAERAEEQHEKYRPSQDQGLPASRCLRCCDPGTSMYPATAVPQINITILKGEKGDRGDRGLQGKYGKTGSAGARGHTGPKGQKGSMGAPGERCKSHYAAFSVGRKKPMHSNHYYQTVIFDTEFVNLYDHFNMFTGKFYCYVPGLYFFSLNVHTWNQKETYLHIMKNEEEVVILFAQVGDRSIMQSQSLMLELREQDQVWVRLYKGERENAIFSEELDTYITFSGYLVKHATEP

SEQ ID NO: 721 - protein, 756 aa, Homo sapiens
MARSPPATLFLFLLLLGQPPPSRPQSLGTTKLRLVGPESKPEEGRLEVLHQGQWGTVCDDNFAIQEATVACRQLGFEAALTWAHSAKYGQGEGPIWLDNVQCVGTESSLDQCGSNGWGVSDCSHSEDVGVICHPRRHRGYLSETVSNALGPQGRRLEEVRLKPILASAKQHSPVTEGAVEVKYEGHWRQVCDQGWTMNNSRVVCGMLGFPSEVPVDSHYYRKVWDLKMRDPKSRLKSLTNKNSFWIHQVTCLGTEPHMANCQVQVAPARGKLRPACPGGMHAVVSCVAGPHFRPPKTKPQRKGSWAEEPRVRLRSGAQVGEGRVEVLMNRQWGTVCDHRWNLISASVVCRQLGFGSAREALFGARLGQGLGPIHLSEVRCRGYERTLSDCPALEGSQNGCQHENAAAVRCNVPNMGFQNQVRLAGGRIPEEGLLEVQVEVNGVPRWGSVCSENWGLTEAMVACRQLGLGFAIHAYKETWFWSGTPRAQEVVMSGVRCSGTELALQQCQRHGPVHCSHGGGRFLAGVSCMDSAPDLVMNAQLVQETAYLEDRPLSQLYCAHEENCLSKSADHMDWPYGYRRLLRFSTQIYNLGRTDFRPKTGRDSWVWHQCHRHYHSIEVFTHYDLLTLNGSKVAEGHKASFCLEDTNCPTGLQRRYACANFGEQGVTVGCWDTYRHDIDCQWVDITDVGPGNYIFQVIVNPHYEVAESDFSNNMLQCRCKYDGHRVWLHNCHTGNSYPANAELSLEQEQRLRNNLI

SEQ ID NO: 722 - protein, 439 aa, Homo sapiens
MKLVTKHFPGEFGSEILVQKVVHTILHQTAKKNPDDYTPVNIDGAHAQRVGDVQGQESESQLPTKIILTGQKTKTLHKEELNMSKTERTIQQNITEQASVMQKRKTEKLKQEQKGQPRTVSPSTIRDGPSSAPATPTKAPYSPTTSKEKKIRITTNDGRQSMVTLKSSTTFFELQESIAREFNIFPYLQCIRYGFPPKELMPPQAGMEKEPVPLQHGDRITIEILKSKAEGGQSAAAHSAHTVKQEDIAVTGKLSSKELQEQAEKEMYSLCLLATLMGEDVWSYAKGLPHMFQQGGVFYSIMKKTMGMADGKHCTFPHLPGKTFVYNASEDRLELCVDAAGHFPIGPDVEDLVKEAVSQVRSEATTRSRESSPSHGLLKLGSGGVVKKKSEQLHNVTAFQGKGHSLGTASGNPHLDPRARETSVVRKHNTGTDFSNSST

SEQ ID NO: 723 - protein, 524 aa, Homo sapiens
MTAEDSTAAMSSDSAAGSSAKVPEGVAGAPNEAALLALMERTGYSMVQENGQRKYGGPPPGWEGPHPQRGCEVFVGKIPRDVYEDELVPVFEAVGRTYELRLMMDFDGKNRGYAFVMYCHKHEAKRAVRELNNYEIRPGRLLGVCCSVDNCRLFIGGIPKMKKREEILEEIAKVTEGVLDVIVYASAADKMKNRGFAFVEYESHRAAAMARRKLMPGRIQLWGHQIAVDWAEPEIDVDEDVMETVKILYVRNLMIETTEDTIKKSFGQFNPGCVERVKKIRDYAFVHFTSREDAVHAMNNLNGTELEGSCLEVTLAKPVDKEQYSRYQKAARGGGAAEAAQQPSYVYSCDPYTLAYYGYPYNALIGPNRDYFVKVAIPAIGAQYSMFPAAPAPKMIEDGKIHTVEHMISPIAVQPDPASAAAAAAAAAAAAAAVIPTVSTPPPFQGRPITPVYTVAPNVQRIPTAGIYGASYVPFAAPATATIATLQKNAAAAAAVYGGYAGYIPQAFPAAAIQVPIPDVYQTY

SEQ ID NO: 724 - protein, 132 aa, Homo sapiens
MGIVANFQELAVPVVHDGGALLAFVCGVVYTLLQSIISYKSCPQWNSLSTCHIRMVISAVSCAAVIPMIVCASLISITKLEWNPREKDYVYHVVSAICEWTVAFGFIFYFLTFIQDFQSVTLRISTEINGDI

SEQ ID NO: 725 - protein, 246 aa, Homo sapiens
MVVDFWTWEQTFQELIQEAKPRATWTLKLDGNLQLDCLAQGWKQYQQRAFGWFRCSSCQRSWASAKLQILCHTYWEHWTSQGQVRMRLFGQRCQKCSWSQYEMPEFSSDSTMRILSNLVQHILKKYYGNGMRKSPEMPVILEVSLEGSHDTANCEACTLGICGQGLKSYMTKPSKSLLPHLKTGNSSPGIGAVYLANQAKNQSDEAKEAKGSGYEKLGPSRDPDPLNICVFILLLVFIVVKCFTSE

SEQ ID NO: 726 - protein, 325 aa, Homo sapiens
MATPLPPPSPRHLRLLRLLLSGLVLGAALRGAAAGHPDVAACPGSLDCALKRRARCPPGAHACGPCLQPFQEDQQGLCVPRMRRPPGGGRPQPRLEDEIDFLAQELARKESGHSTPPLPKDRQRLPEPATLGFSARGQGLELGLPSTPGTPTPTPHTSMGSPVSSDPVHMSPLEPRGGQGDGLALVLILAFCVAGAAALSVASLCWCRLHREIRLTQKADYATAKAPGSPAAPRISPGDQRLAQSAEMYHYQHQRQQMLCLERHKEPPKELDTASSDEENEDGDFTVYECPGLAPTGEMEVRNPLFDHAALSAPLPAPSSPPALP

SEQ ID NO: 727 - protein, 114 aa, Homo sapiens; identical to SEQ ID NO: 611

SEQ ID NO: 728 - protein, 362 aa, Homo sapiens
MLVMAPRTVLLLLSAALALTETWAGSHSMRYFYTSVSRPGRGEPRFISVGYVDDTQFVRFDSDAASPREEPRAPWIEQEGPEYWDRNTQIYKAQAQTDRESLRNLRGYYNQSEAGSHTLQSMYGCDVGPDGRLLRGHDQYAYDGKDYIALNEDLRSWTAADTAAQITQRKWEAAREAEQRRAYLEGECVEWLRRYLENGKDKLERADPPKTHVTHHPISDHEATLRCWALGFYPAEITLTWQRDGEDQTQDTELVETRPAGDRTFQKWAAVVVPSGEEQRYTCHVQHEGLPKPLTLRWEPSSQSTVPIVGIVAGLAVLAVVVIGAVVAAVMCRRKSSGGKGGSYSQAACSDSAQGSDVSLTA

SEQ ID NO: 729 - protein, 383 aa, Homo sapiens
MLSRKKTKNEVSKPAEVQGKYVKKETSPLLRNLMPSFIRHGPTIPRRTDICLPDSSPNAFSTSGDVVSRNQSFLRTPIQRTPHEIMRRESNRLSAPSYLARSLADVPREYGSSQSFVTEVSFAVENGDSGSRYYYSDNFFDGQRKRPLGDRAHEDYRYYEYNHDLFQRMPQNQGRHASGIGRVAATSLGNLTNHGSEDLPLPPGWSVDWTMRGRKYYIDHNTNTTHWSHPLEREGLPPGWERVESSEFGTYYVDHTNKKAQYRHPCAPSVPRYDQPPPVTYQPQQTERNQSLLVPANPYHTAEIPDWLQVYARAPVKYDHILKWELFQLADLDTYQGMLKLLFMKELEQIVKMYEAYRQALLTELENRKQRQQWYAQQHGKNF

SEQ ID NO: 730 - protein, 682 aa, Homo sapiens
MVSSNFWFKYPKTCSKVEHFVSILGKCFESPWTTKALSETACEDSEENKQRITGAQTLPKHVSTSSDEGSPSASTPMINKTGFKFSAEKPVIEVPSMTILDKKDGEQAKALFEKVRKFRAHVEDSDLIYKLYVVQTVIKTAKFIFILCYTANFVNAISFEHVCKPKVEHLIGYEVFECTHNMAYMLKKLLISYISIICVYGFICLYTLFWLFRIPLKEYSFEKVREESSFSDIPDVKNDFAFLLHMVDQYDQLYSKRFGVFLSEVSENKLREISLNHEWTFEKLRQHISRNAQDKQELHLFMLSGVPDAVFDLTDLDVLKLELIPEAKIPAKISQMTNLQELHLCHCPAKVEQTAFSFLRDHLRCLHVKFTDVAEIPAWVYLLKNLRELYLIGNLNSENNKMIGLESLRELRHLKILHVKSNLTKVPSNITDVAPHLTKLVIHNDGTKLLVLNSLKKMMNVAELELQNCELERIPHAIFSLSNLQELDLKSNNIRTIEEIISFQHLKRLTCLKLWHNKIVTIPPSITHVKNLESLYFSNNKLESLPVAVFSLQKLRCLDVSYNNISMIPIEIGLLQNLQHLHITGNKVDILPKQLFKCIKLRTLNLGQNCITSLPEKVGQLSQLTQLELKGNCLDRLPAQLGQCRMLKKSGLVVEDHLFDTLPLEVKEALNQDINIPFANGI

SEQ ID NO: 731 - protein, 103 aa, Homo sapiens [sequence omitted]

SEQ ID NO: 732 - protein, 128 aa, Homo sapiens
MHIVFYRQKIIQKYAKNCREAYKTLSSLYSEMQKMNELENKAEPGTHLCIDVEDAMNITRKLWSRTFNCSVPCSDTVPVIAVSVFILFLPVVFYLSSFLHSEQKKRKLILPKRLKSSTSFANIQENSN

SEQ ID NO: 733 - protein, 492 aa, Homo sapiens
MALNSGSPPAIGPYYENHGYQPENPYPAQPTVVPTVYEVHPAQYYPSPVPQYAPRVLTQASNPVVCTQPKSPSGTVCTSKTKKALCITLTLGTFLVGAALAAGLLWKFMGSKCSNSGIECDSSGTCINPSNWCDGVSHCPGGEDENRCVRLYGPNFILQMYSSQRKSWHPVCQDDWNENYGRAACRDMGYKNNFYSSQGIVDDSGSTSFMKLNTSAGNVDIYKKLYHSDACSSKAVVSLRCIACGVNLNSSRQSRIVGGESALPGAWPWQVSLHVQNVHVCGGSIITPEWIVTAAHCVEKPLNNPWHWTAFAGILRQSFMFYGAGYQVEKVISHPNYDSKTKNNDIALMKLQKPLTFNDLVKPVCLPNPGMMLQPEQLCWISGWGATEEKGKTSEVLNAAKVLLIETQRCNSRYVYDNLITPAMICAGFLQGNVDSCQGDSGGPLVTSKNNIWWLIGDTSWGSGCAKAYRPGVYGNVMVFTDWIYRQMRADG

SEQ ID NO: 734 - protein, 463 aa, Homo sapiens; identical to SEQ ID NO: 642

SEQ ID NO: 735 - protein, 290 aa, Homo sapiens
MRIFAVFIFMTYWHLLNAFTVTVPKDLYVVEYGSNMTIECKFPVEKQLDLAALIVYWEMEDKNIIQFVHGEEDLKVQHSSYRQRARLLKDQLSLGNAALQITDVKLQDAGVYRCMISYGGADYKRITVKVNAPYNKINQRILVVDPVTSEHELTCQAEGYPKAEVIWTSSDHQVLSGKTTTTNSKREEKLFNVTSTLRINTTTNEIFYCTFRRLDPEENHTAELVIPELPLAHPPNERTHLVILGAILLCLGVALTFIFRLRKGRMMDVKKCGIQDTNSKKQSDTHLEET

SEQ ID NO: 736 - protein, 422 aa, Homo sapiens [sequence omitted]

SEQ ID NO: 737 - protein, 1049 aa, Homo sapiens
  MISC_FEATURE (910)..(910): "Xaa" = any amino acid
MALVTLQRSPTPSAASSSASNSELEAGSEEDRKLNLSLSESFFMVKGAALFLQQGSSPQGQRSLQHPHKHAGDLPQHLQVMINLLRCEDRIKLAVRLESAWADRVRYMVVVYSSGRQDTEENILLGVDFSSKESKSCTIGMVLRLWSDTKIHLDGDGGFSVSTAGRMHIFKPVSVQAMWSALQVLHKACEVARRHNYFPGGVALIWATYYESCISSEQSCINEWNAMQDLESTRPDSPALFVDKPTEGERTERLIKAKLRSIMMSQDLENVTSKEIRNELEKQMNCNLKELKEFIDNEMLLILGQMDKPSLIFDHLYLGSEWNASNLEELQGSGVDYILNVTREIDNFFPGLFAYHNIRVYDEETTDLLAHWNEAYHFINKAKRNHSKCLVHCKMGVSRSASTVIAYAMKEFGWPLEKAYNYVKQKRSITRPNAGFMRQLSEYEGILDASKQRHNKLWRQQTDSSLQQPVDDPAGPGDFLPETPDGTPESQLPFLDDAAQPGLGPPLPCCFRRLSDPLLPSPEDETGSLVHLEDPEREALLEEAAPPAEVHRPARQPQQGSGLCEKDVKKKLEFGSPKGRSGSLLQVEETEREEGLGAGRWGQLPTQLDQNLLNSENLNNNSKRSCPNGMEDDAIFGILNKVKPSYKSCADCMYPTASGAPEASRERCEDPNAPAICTQPAFLPHITSSPVAHLASRSRVPEKPASGPTEPPPFLPPAGSRRADTSGPGAGAALEPPASLLEPSRETPKVLPKSLLLKNSHCDKNPPSTEVVIKEESSPKKDMKPAKDLRLLFSNESEKPTTNSYLMQHQESIIQLQKAGLVRKHTKELERLKSVPADPAPPSRDGPASRLEASIPEESQDPAALHELGPLVMPSQAGSDEKSEAAPASLEGGSLKSPPPFFYRLDHTSXFSKDFLKTICYTPTSSSMSSNLTRSSSSDSIHSVRGKPGLVKQRTQEIETRLRLAGLTVSSPLKRSHSLAKLGSLTFSTEDLSSEADPSTVADSQDTTLSESSFLHEPQGTPRDPAATSKPSGKPAPENLKSPSWMSKS

SEQ ID NO: 738 - protein, 1226 aa, Homo sapiens
MNPRQGYSLSGYYTHPFQGYEHRQLRYQQPGPGSSPSSFLLKQIEFLKGQLPEAPVIGKQTPSLPPSLPGLRPRFPVLLASSTRGRQVDIRGVPRGVHLGSQGLQRGFQHPSPRGRSLPQRGVDCLSSHFQELSIYQDQEQRILKFLEELGEGKATTAHDLSGKLGTPKKEINRVLYSLAKKGKLQKEAGTPPLWKIAVSTQAWNQHSGVVRPDGHSQGAPNSDPSLEPEDRNSTSVSEDLLEPFIAVSAQAWNQHSGVVRPDSHSQGSPNSDPGLEPEDSNSTSALEDPLEFLDMAEIKEKICDYLFNVSDSSALNLAKNIGLTKARDINAVLIDMERQGDVYRQGTTPPIWHLTDKKRERMQIKRNTNSVPETAPAAIPETRRNAEFLTCNIPTSNASNNMVTTEKVENGQEPVIKLENRQEARPEPARLKPPVHYNGPSKAGYVDFENGQWATDDIPDDLNSIRAAPGEFRAIMEMPSFYSHGLPRCSPYKKLTECQLKNPISGLLEYAQFASQTCEFNMIEQSGPPHEPRFKFQVVINGREFPPAEAGSKKVAKQDAAMKAMTILLEEAKAKDSGKSEESSHYSTEKESEKTAESQTPTPSATSFFSGKSPVTTLLECMHKLGNSCEFRLLSKEGPAHEPKFQYCVAVGAQTFPSVSAPSKKVAKQMAAEEAMKALHGEATNSMASDNQPEGMISESLDNLESMMPNKVRKIGELVRYLNTNPVGGLLEYARSHGFAAEFKLVDQSGPPHEPKFVYQAKVGGRWFPAVCAHSKKQGKQEAADAALRVLIGENEKAERMGFTEVTPVTGASLRRTMLLLSRSPEAQPKTLPLTGSTFHDQIAMLSHRCFNTLTNSFQPSLLGRKILAAIIMKKDSEDMGVVVSLGTGNRCVKGDSLSLKGETVNDCHAEIISRRGFIRFLYSELMKYNSQTAKDSIFEPAKGGEKLQIKKTVSFHLYISTAPCGDGALFDKSCSDRAMESTESRHYPVFENPKQGKLRTKVENGEGTIPVESSDIVPTWDGIRLGERLRTMSCSDKILRWNVLGLQGALLTHFLQPIYLKSVTLGYLFSQGHLTRAICCRVTRDGSAFEDGLRHPFIVNHPKVGRVSIYDSKRQSGKTKETSVNWCLADGYDLEILDGTRGTVDGPRNELSRVSKKNIFLLFKKLCSFRYRRDLLRLSYGEAKKAARDYETAKNYFKKGLKDMGYGNWISKPQEEKNFYLCPV

SEQ ID NO: 739 - protein, 1200 aa, Homo sapiens
MNPRQGYSLSGYYTHPFQGYEHRQLRYQQPGPGSSPSSFLLKQIEFLKGQLPEAPVIGKQTPSLPPSLPGLRPRFPVLLASSTRGRQVDIRGVPRGVHLGSQGLQRGFQHPSPRGRSLPQRGVDCLSSHFQELSIYQDQEQRILKFLEELGEGKATTAHDLSGKLGTPKKEINRVLYSLAKKGKLQKEAGTPPLWKIAVSTQAWNQHSGVVRPDGHSQGAPNSDPSLEPEDRNSTSVSEDLLEPFIAVSAQAWNQHSGVVRPDSHSQGSPNSDPGLEPEDSNSTSALEDPLEFLDMAEIKEKICDYLFNVSDSSALNLAKNIGLTKARDINAVLIDMERQGDVYRQGTTPPIWHLTDKKRERMQIKRNTNSVPETAPAAIPETRRNAEFLTCNIPTSNASNNMVTTEKVENGQEPVIKLENRQEARPEPARLKPPVHYNGPSKAGYVDFENGQWATDDIPDDLNSIRAAPGEFRAIMEMPSFYSHGLPRCSPYKKLTECQLKNPISGLLEYAQFASQTCEFNMIEQSGPPHEPRFKFQVVINGREFPPAEAGSKKVAKQDAAMKAMTILLEEAKAKDSGKSEESSHYSTEKESEKTAESQTPTPSATSFFSGKSPVTTLLECMHKLGNSCEFRLLSKEGPAHEPKFQYCVAVGAQTFPSVSAPSKKVAKQMAAEEAMKALHGEATNSMASDNQPEGMISESLDNLESMMPNKVRKIGELVRYLNTNPVGGLLEYARSHGFAAEFKLVDQSGPPHEPKFVYQAKVGGRWFPAVCAHSKKQGKQEAADAALRVLIGENEKAERMGFTELPLTGSTFHDQIAMLSHRCFNTLTNSFQPSLLGRKILAAIIMKKDSEDMGVVVSLGTGNRCVKGDSLSLKGETVNDCHAEIISRRGFIRFLYSELMKYNSQTAKDSIFEPAKGGEKLQIKKTVSFHLYISTAPCGDGALFDKSCSDRAMESTESRHYPVFENPKQGKLRTKVENGEGTIPVESSDIVPTWDGIRLGERLRTMSCSDKILRWNVLGLQGALLTHFLQPIYLKSVTLGYLFSQGHLTRAICCRVTRDGSAFEDGLRHPFIVNHPKVGRVSIYDSKRQSGKTKETSVNWCLADGYDLEILDGTRGTVDGPRNELSRVSKKNIFLLFKKLCSFRYRRDLLRLSYGEAKKAARDYETAKNYFKKGLKDMGYGNWISKPQEEKNFYLCPV

SEQ ID NO: 740 - protein, 1181 aa, Homo sapiens
MNPRQGYSLSGYYTHPFQGYEHRQLRYQQPGPGSSPSSFLLKQIEFLKGQLPEAPVIGKQTPSLPPSLPGLRPRFPVLLASSTRGRQVDIRGVPRGVHLGSQGLQRGFQHPSPRGRSLPQRGVDCLSSHFQELSIYQDQEQRILKFLEELGEGKATTAHDLSGKLGTPKKEINRVLYSLAKKGKLQKEAGTPPLWKIAVSTQAWNQHSGVVRPDGHSQGAPNSDPSLEPEDRNSTSVSEDLLEPFIAVSAQAWNQHSGVVRPDSHSQGSPNSDPGLEPEDSNSTSALEDPLEFLDMAEIKEKICDYLFNVSDSSALNLAKNIGLTKARDINAVLIDMERQGDVYRQGTTPPIWHLTDKKRERMQIKRNTNSVPETAPAAIPETRRNAEFLTCNIPTSNASNNMVTTEKVENGQEPVIKLENRQEARPEPARLKPPVHYNGPSKAGYVDFENGQWATDDIPDDLNSIRAAPGEFRAIMEMPSFYSHGLPRCSPYKKLTECQLKNPISGLLEYAQFASQTCEFNMIEQSGPPHEPRFKFQVVINGREFPPAEAGSKKVAKQDAAMKAMTILLEEAKAKDSGKSEESSHYSTEKESEKTAESQTPTPSATSFFSGKSPVTTLLECMHKLGNSCEFRLLSKEGPAHEPKFQYCVAVGAQTFPSVSAPSKKVAKQMAAEEAMKALHGEATNSMASDNQVRKIGELVRYLNTNPVGGLLEYARSHGFAAEFKLVDQSGPPHEPKFVYQAKVGGRWFPAVCAHSKKQGKQEAADAALRVLIGENEKAERMGFTELPLTGSTFHDQIAMLSHRCFNTLTNSFQPSLLGRKILAAIIMKKDSEDMGVVVSLGTGNRCVKGDSLSLKGETVNDCHAEIISRRGFIRFLYSELMKYNSQTAKDSIFEPAKGGEKLQIKKTVSFHLYISTAPCGDGALFDKSCSDRAMESTESRHYPVFENPKQGKLRTKVENGEGTIPVESSDIVPTWDGIRLGERLRTMSCSDKILRWNVLGLQGALLTHFLQPIYLKSVTLGYLFSQGHLTRAICCRVTRDGSAFEDGLRHPFIVNHPKVGRVSIYDSKRQSGKTKETSVNWCLADGYDLEILDGTRGTVDGPRNELSRVSKKNIFLLFKKLCSFRYRRDLLRLSYGEAKKAARDYETAKNYFKKGLKDMGYGNWISKPQEEKNFYLCPV

SEQ ID NO: 741 - protein, 1548 aa, Homo sapiens
MLRARPEALMLLGALLTGSLGPSGSQDALSLPWEVQRYDGWFNNLRHHERGAVGCRLQRRVPANYADGVYQALEEPQLPNPRRLSNAATRGIAGLPSLHNRTVLGVFFGYHVLSDVVSVETPGCPAEFLNIRIPPGDPVFDPDQRGDVVLPFQRSRWDPETGRSPSNPRDLANQVTGWLDGSAIYGSSHSWSDALRSFSGGQLASGPDPAFPRDSQNPLLMWAAPDPATGQNGPRGLYAFGAERGNREPFLQALGLLWFRYHNLWAQRLARQHPDWEDEELFQHARKRVIATYQNIAVYEWLPSFLQKTLPEYTGYRPFLDPSISPEFVVASEQFFSTMVPPGVYMRNASCHFRKVLNKGFQSSQALRVCNNYWIRENPNLNSTQEVNELLLGMASQISELEDNIVVEDLRDYWPGPGKFSRTDYVASSIQRGRDMGLPSYSQALLAFGLDIPRNWSDLNPNVDPQVLEATAALYNQDLSQLELLLGGLLESHGDPGPLFSAIVLDQFVRLRDGDRYWFENTRNGLFSKKEIEDIRNTTLRDVLVAVINIDPSALQPNVFVWHKGAPCPQPKQLTTDGLPQCAPLTVLDFFEGSSPGFAITIIALCCLPLVSLLLSGVVAYFRGREHKKLQKKLKESVKKEAAKDGVPAMEWPGPKERSSPIIIQLLSDRCLQVLNRHLTVLRVVQLQPLQQVNLILSNNRGCRTLLLKIPKEYDLVLLFSSEEERGAFVQQLWDFCVRWALGLHVAEMSEKELFRKAVTKQQRERILEIFFRHLFAQVLDINQADAGTLPLDSSQKVREALTCELSRAEFAESLGLKPQDMFVESMFSLADKDGNGYLSFREFLDILVVFMKGSPEDKSRLMFTMYDLDENGFLSKDEFFTMMRSFIEISNNCLSKAQLAEVVESMFRESGFQDKEELTWEDFHFMLRDHDSELRFTQLCVKGGGGGGNGIRDIFKQNISCRVSFITRTPGERSHPQGLGPPAPEAPELGGPGLKKRFGKKAAVPTPRLYTEALQEKMQRGFLAQKLQQYKRFVENYRRHIVCVAIFSAICVGVFADRAYYYGFALPPSDIAQTTLVGIILSRGTAASVSFMFSYILLTMCRNLITFLRETFLNRYVPFDAAVDFHRWIAMAAVVLAILHSAGHAVNVYIFSVSPLSLLACIFPNVFVNDGSKLPQKFYWWFFQTVPGMTGVLLLLVLAIMYVFASHHFRRRSFRGFWLTHHLYILLYALLIIHGSYALIQLPTFHIYFLVPAIIYGGDKLVSLSRKKVEISVVKAELLPSGVTYLQFQRPQGFEYKSGQWVRIACLALGTTEYHPFTLTSAPHEDTLSLHIRAVGPWTTRLREIYSSPKGNGCAGYPKLYLDGPFGEGHQEWHKFEVSVLVGGGIGVTPFASILKDLVFKSSLGSQMLCKKIYFIWVTRTQRQFEWLADIIQEVEENDHQDLVSVHIYVTQLAEKFDLRTTMLYICERHFQKVLNRSLFTGLRSITHFGRPPFEPFFNSLQEVHPQVRKIGVFSCGPPGMTKNVEKACQLVNRQDRAHFMHHYENF

SEQ ID NO: 742 - protein, 318 aa, Homo sapiens; identical to SEQ ID NO: 563

SEQ ID NO: 743 - protein, 715 aa, Homo sapiens; identical to SEQ ID NO: 655

SEQ ID NO: 744 - protein, 307 aa, Homo sapiens
MNTRNRVVNSGLGASPASRPTRDPQDPSGRQGELSPVEDQREGLEAAPKGPSRESVVHAGQRRTSAYTLIAPNINRRNEIQRIAEQELANLEKWKEQNRAKPVHLVPRRLGGSQSETEVRQKQQLQLMQSKYKQKLKREESVRIKKEAEEAELQKMKAIQREKSNKLEEKKRLQENLRREAFREHQQYKTAEFLSKLNTESPDRSACQSAVCGPQSSTWARSWAYRDSLKAEENRKLQKMKDEQHQKSELLELKRQQQEQERAKIHQTEHRRVNNAFLDRLQGKSQPGGLEQSGGCWNMNSGNSWGI

SEQ ID NO: 745 - protein, 94 aa, Homo sapiens
MMGLSLASAVLLASLLSLHLGTATRGSDISKTCCFQYSHKPLPWTWVRSYEFTSNSCSQRAVIFTTKRGKKVCTHPRKKWVQKYISLLKTPKQL

SEQ ID NO: 746 - protein, 384 aa, Homo sapiens
MDCSNGSAECTGEGGSKEVVGTFKAKDLIVTPATILKEKPDPNNLVFGTVFTDHMLTVEWSSEFGWEKPHIKPLQNLSLHPGSSALHYAVELFEGLKAFRGVDNKIRLFQPNLNMDRMYRSAVRATLPVFDKEELLECIQQLVKLDQEWVPYSTSASLYIRPAFIGTEPSLGVKKPTKALLFVLLSPVGPYFSSGTFNPVSLWANPKYVRAWKGGTGDCKMGGNYGSSLFAQCEDVDNGCQQVLWLYGRDHQITEVGTMNLFLYWINEDGEEELATPPLDGIILPGVTRRCILDLAHQWGEFKVSERYLTMDDLTTALEGNRVREMFSSGTACVVCPVSDILYKGETIHIPTMENGPKLASRILSKLTDIQYGREESDWTIVLS

SEQ ID NO: 747 - protein, 925 aa, Homo sapiens [sequence omitted]

SEQ ID NO: 748 - protein, 438 aa, Homo sapiens
MVQWKRLCQLHYLWALGCYMLLATVALKLSFRLKCDSDHLGLESRESQSQYCRNILYNFLKLPAKRSINCSGVTRGDQEAVLQAILNNLEVKKKREPFTDTHYLSLTRDCEHFKAERKFIQFPLSKEEVEFPIAYSMVIHEKIENFERLLRAVYAPQNIYCVHVDEKSPETFKEAVKAIISCFPNVFIASKLVRVVYASWSRVQADLNCMEDLLQSSVPWKYFLNTCGTDFPIKSNAEMVQALKMLNGRNSMESEVPPKHKETRWKYHFEVVRDTLHLTNKKKDPPPYNLTMFTGNAYIVASRDFVQHVLKNPKSQQLIEWVKDTYSPDEHLWATLQRARWMPGSVPNHPKYDISDMTSIARLVKWQGHEGDIDKGAPYAPCSGIHQRAICVYGAGDLNWMLQNHHLLANKFDPKVDDNALQCLEEYLRYKAIYGTEL

SEQ ID NO: 749 - protein, 687 aa, Homo sapiens; identical to SEQ ID NO: 577

SEQ ID NO: 750 - protein, 727 aa, Homo sapiens
MGNGESQLSSVPAQKLGWFIQEYLKPYEECQTLIDEMVNTICDVCRNPEQFPLVQGVAIGGSYGRKTVLRGNSDGTLVLFFSDLKQFQDQKRSQRDILDKTGDKLKFCLFTKWLKNNFEIQKSLDGSTIQVFTKNQRISFEVLAAFNALSLNDNPSPWIYRELKRSLDKTNASPGEFAVCFTELQQKFFDNRPGKLKDLILLIKHWHQQCQKKIKDLPSLSPYALELLTVYAWEQGCRKDNFDIAEGVRTVLELIKCQEKLCIYWMVNYNFEDETIRNILLHQLQSARPVILDPVDPTNNVSGDKICWQWLKKEAQTWLTSPNLDNELPAPSWNVLPAPLFTTPGHLLDKFIKEFLQPNKCFLEQIDSAVNIIRTFLKENCFRQSTAKIQIVRGGSTAKGTALKTGSDADLVVFHNSLKSYTSQKNERHKIVKEIHEQLKAFWREKEEELEVSFEPPKWKAPRVLSFSLKSKVLNESVSFDVLPAFNALGQLSSGSTPSPEVYAGLIDLYKSSDLPGGEFSTCFTVLQRNFIRSRPTKLKDLIRLVKHWYKECERKLKPKGSLPPKYALELLTIYAWEQGSGVPDFDTAEGFRTVLELVTQYQQLGIFWKVNYNFEDETVRKFLLSQLQKTRPVILDPGEPTGDVGGGDRWCWHLLDKEAKVRLSSPCFKDGTGNPIPPWKVPTMQTPGSCGARIHPIVNEMFSSRSHRILNNNSKRNFWRSSGNRF

SEQ ID NO: 751 - protein, 134 aa, Homo sapiens
MNRVNDPLIFIRDIKPGLKNLNVVFIVLEIGRVTKTKDGHEVRSCKVADKTGSITISVWDEIGGLIQPGDIIRLTRGYASMWKGCLTLYTGRGGELQKIGDLGAVQAAAMRDSIHYYPGNDLHPDLEEPSSLGV

SEQ ID NO: 752 - protein, 298 aa, Homo sapiens
MVPQIEGNTGTVPQPTNVKVVLPAAGLSAAQPPASYPLPGSPLAAGVLPSQNSSVLSTAATSPQPASAGISQAQATVPPAVPTHTPGPAPSPSPALTHSTAQSDSTSYISAVGNTNANGTVVPPQQMGSGPCGSCGRRCSCGTNGNLQLNSYYYPNPMPGPMYRVPSFFTLPSICNGSYLNQAHQSNGNQLPFFLPQTPYANGLVHDPVMGSQANYGMQQMAGFGRFYPVYPAPNVVANTSGSGPKKNGNVSCYNCGVSGHYAQDCKQSSMEANQQGTYRLRYAPPLPPSNDTLDSAD

SEQ ID NO: 753 - protein, 501 aa, Homo sapiens [sequence omitted]

SEQ ID NO: 754 - protein, 205 aa, Homo sapiens
MVNLAAMVWRRLLRKRWVLALVFGLSLVYFLSSTFKQEERAVRDRNLLQVHDHNQPIPWKVQFNLGNSSRPSNQCRNSIQGKHLITDELGYVCERKDLLVNGCCNVNVPSTKQYCCDGCWPNGCCSAYEYCVSCCLQPNKQLLLERFLNRAAVAFQNLFMAVEDHFELCLAKCRTSSQSVQHENTYRDPIAKYCYGESPPELFPA

SEQ ID NO: 755 - protein, 229 aa, Homo sapiens
MAALGHLAGEAAAAPGPGTPCASRGARLPGPVSSARNPSTVCLCPEQPTCSNADSRAHPLGDEGGTASKKQKNKKKTRNRASVANGGEKASEKLAPEEVPLSAEAQAQQLAQELAWCVEQLELGLKRQKPTPKQKEQAIGAIRTLRSKRTPLPRKRQLMHSLFGDYRAQMEAEWREALRALRAAAYSAQVQPVDGATRKKSQRVCRPRSIWRAKATLDMPDEEFRFNFF

SEQ ID NO: 756 - protein, 361 aa, Homo sapiens
MWVLTPAAFAGKLLSVFRQPLSSLWRSLVPLFCWLRATFWLRATKRRKQQLVLRGPDETKEEEEDPPLPTTPTSVNYHFTRQCNYKCGFCFHTAKTSFVLPLEEAKRGLLLLKEAGMEKINFSGGEPFLQDRGEYLGKLVRFCKVELRLPSVSIVSNGSLIRERWFQNYGEYLDILAISCDSFDEEVNVLIGRGQGKKNHVENLQKLRRWCRDYRVAFKINSVINRFNVEEDMTEQIKALNPVRWKVFQCLLIEGENCGEDALREAERFVIGDEEFERFLERHKEVSCLVPESNQKMKDSYLILDEYMRFLNCRKGRKDPSKSILDVGVEEAIKFSGFDEKMFLKRGGKYIWSKADLKLDW

SEQ ID NO: 757 - protein, 211 aa, Homo sapiens; identical to SEQ ID NO: 695

SEQ ID NO: 758 - protein, 5065 aa, Homo sapiens
MAATLGAGTPPRPQARSIAGVYVEASGQAQSVYAAMEQGLLPAGLGQALLEAQAATGGLVDLARGQLLPVSKALQQGLVGLELKEKLLAAERATTGYPDPYGGEKLALFQAIGKEVVDRALGQSWLEVQLATGGLVDPAQGVLVAPEPACHQGLLDRETWHKLSELEPGTGDLRFLNPNTLERLTYHQLLERCVRAPGSGLALLPLKITFRSMGGAVSAAELLEVGILDEQAVQGLREGRLAAVDVSARAEVRRYLEGTGSVAGVVLLPEGHKKSFFQAATEHLLPMGTALPLLEAQAATHTLVDPITGQRLWVDEAVRAGLVSPELHEQLLVAEQAVTGHHDPFSGSQIPLFQAMKKGLVDRPLALRLLDAQLATGGLVCPARRLRLPLEAALRCGCLDEDTQRQLSQAGSFSDGTHGGLRYEQLLALCVTDPETGLAFLPLSGGPRGGEPQGPPFIKYSTRQALSTATATVSVGKFRGRPVSLWELLFSEAISSEQRAMLAQQYQEGTLSVEKLAAELSATLEQAAATARVTFSGLRDTVTPGELLKAEIIDQDLYERLEHGQATAKDVGSLASAQRYLQGTGCIAGLLLPGSQERLSIYEARCKGLLRPGTALILLEAQAATGFIIDPKANKGHSVEEALRAAVIGPDVFAKLLSAERAVTGYTDPYTGQQISLFQAMQKGLIVREHGIRLLEAQIATGGVIDPVHSHRVPVDVAYRRGYFDQMLNLILLDPSDDTKGFFDPNTHENLTYLQLLERCVRDPETGLYLLPLSSTQSPLVDSATQQAFQNLLLSVKYGRFQGQRVSAWELINSEYFSEGRRRQLLRRYRQREVTLGQVAKLLEAETQRQADIMLPALRSRVTVHQLLEAGIIDQQLLDQVLAGTISPEALLLMDGVRRYLCGLGAVGGVRLLPSGQRLSLYQAMRQKLLGPRVALALLEAQAATGTIMDPHSPESLSVDEAVRRGVVGPELYGRLKRAEGAIAGFRDPFSGKQVSVFQAMKKGLIPWEQAARLLEAQVATGGIIDPTSHHHLPMPVAIQRGYVDQEMETALSSSSETFPTPDGQGRTSYAQLLEECPRDETSGLHLLPLPESAPALPTEEQVQRSLQAVPGAKDGTSLWDLLSSCHFTEEQRRGLLEDVQEGRTTVPQLLASVQRWVQETKLLAQARVMVPGPRGEVPAVWLLDAGIITQETLEALAQGTQSPAQVAEQPAVKACLWGTGCVAGVLLQPSGAKASIAQAVRDGLLPTGLGQRLLEAQVASGFLVDPLNNQRLSVEDAVKVGLVGRELSEQLGQAERAAAGYPDPYSRASLSLWQAMEKGLVPQNEGLPLLQVQLATGGVVDPVHGVHLPQAAACRLGLLDTQTSQVLTAVDKDNKFFFDPSARDQVTYQQLRERCVCDSETGLLLLPLPSDTVLEVDDHTAVALRAMKVPVSTGRFKGCSVSLWDLLLSEYVGADKRRELVALCRSGRAAALRQVVSAVTALVEAAERQPLQATFRGLRKQVSARDLFRAQLISRKTLDELSQGTTTVKEVAEMDSVKRSLEGGNFIAGVLIQGTQERMSIPEALRRHILRPGTALVLLEAQAATGFIIDPAENRKLTVEEAFKAGMFGKETYVKLLSAERAVTGYTDPYTGQQISLFQAMQKDLIVREHGIRLLEAQIATGGIIDPVHSHRVPVDVAYRCGYFDEEMNRILADPSDDTKGFFDPNTHENLTYLQLLERCVEDPETGLYLLQIIKKGENYVYINEATRHVLQSRTAKMRVGRFADQVVSFWDLLSSPYFTEDRKRELIQEYGAQSGGLEKLLEIITTTIEETETQNQGIKVAAIRGEVTAADLFNSRVIDQKTLHTLRVGRTGGQALSTLECVKPYLEGSDCIAGVTVPSTREVMSLHEASRKELIPAAFATWLLEAQAATGFLLDPCTRQKLSVDEAVDVGLVNEELRERLLKAERAATGYRDPATGDTIPLFQAMQKQLIEKAEALRLLEVQVATGGVIDPQHHHRLPLETAYRRGCLHKDIYALISDQKHMRKRFVDPNTQEKVSYRELQERCRPQEDTGWVLFPVNKAARDSEHIDDETRRALEAEQVEITVGRFRGQKPTLWALLNSEYVTEEKKLQLVRMYRTHTRRALQTVAQLILELIEKQETSNKHLWFQGIRRQITASELLSSAIITEEMLQDLETGRSTTQELMEDDRVKRYLEGTSCIAGVLVPAKDQPGRQEKMSIYQAMWKGVLRPGTALVLLEAQAATGFVIDPVRNLRLSVEEPVPAGVVGSEIQEKLLSAERAVTGYTDPYTGQQISLFQAMQKDLIVREHGIRLLEAQIATGGVIDPVHSHRVPVDVAYRRGYFDEEMNRVLADPSDDTKGFFDPNTHENLTYVQLLRRCVPDPDTGLYMLQLAGRGSAVHQLSEELRCALRDARVTPGSGALQGQSVSVWELLFYREVSEDRRQDLLSRYRAGTLTVEELGATLTSLLAQAQAQARAEAEAGSPRPDPREALRAATMEVKVGRLRGRAVPVWDVLASGYVSRAAREELLAEFGSGTLDLPALTRRLTAIIEEAEEAPGARPQLQDARRGPREPGPAGRGDGDSGRSQREGQGEGETQEAAAAAAAARRQEQTLRDATMEVQRGQFQGRPVSVWDVLFSSYLSEARRDELLAQHAAGALGLPDLVAVLTRVIEETEERLSKVSFRGLRRQVSASELHTSGILGPETLRDLAQGTKTLQEVTEMDSVKRYLEGTSCIAGVLVPAKDQPGRQEKMSIYQAMWKGVLRPGTALVLLEAQAATGFVIDPVRNLRLSVEEAVAAGVVGGEIQEKLLSAERAVTGYTDPYTGQQISLFQAMQKDLIVREHGIRLLEAQIATGGVIDPVHSHRVPVDVAYRRGYFDEEMNRVLADPSDDTKGFFDPNTHENLTYVQLLRRCVPDPDTGLYMLQLAGRGSAVHQLSEELRCALRDARVTPGSGALQGQSVSVWELLFYREVSEDRRQDLLSRYRAGTLTVEELGATLTSLLAQAQAQARAEAEAGSPRPDPREALRAATMEVKVGRLRGRAVPVWDVLASGYVSGAAREELLAEFGSGTLDLPALTRRLTAIIEEAEEAPGARPQLQDAWRGPREPGPAGRGDGDSGRSQREGQGEGETQEAAAAAAAARRQEQTLRDATMEVQRGQFQGRPVSVWDVLFSSYLSEARRDELLAQHAAGALGLPDLVAVLTRVIEETEERLSKVSFRGLRRQVSASELHTSGILGPETLRDLAQGTKTLQEVTEMDSVKRYLEGTSCIAGVLVPAKDQPGRQEKMSIYQAMWKGVLRPGTALVLLEAQAATGFVIDPVRNLRLSVEEAVAAGVVGGEIQEKLLSAERAVTGYTDPYTGQQISLFQAMQKDLIVREHGIRLLEAQIATGGVIDPVHSHRVPVDVAYRRGYFDEEMNRVLADPSDDTKGFFDPNTHENLTYVQLLRRCVPDPDTGLYMLQLAGRGSAVHQLSEELRCALRDARVTPGSGALQGQSVSVWELLFYREVSEDRRQDLLSRYRAGTLTVEELGATLTSLLAQAQAQARAEAEAGSPRPDPREALRAATMEVKVGRLRGRAVPVWDVLASGYVSGAAREELLAEFGSGTLDLPALTRRLTAIIEEAEEAPGARPQLQDAWRGPREPGPAGRGDGDSGRSQREGQGEGETQEAAAAAAAARRQEQTLRDATMEVQRGQFQGRPVSVWDVLFSSYLSEARRDELLAQHAAGALGLPDLVAVLTRVIEETEERLSKVSFRGLRRQVSASELHTSGILGPETLRDLAQGTKTLQEVTEMDSVKRYLEGTSCIAGVLVPAKDQPGRQEKMSIYQAMWKGVLRPGTALVLLEAQAATGFVIDPVRNLRLSVEEAVAAGVVGGEIQEKLLSAERAVTGYTDPYTGQQISLFQAMQKDLIVREHGIRLLEAQIATGGVIDPVHSHRVPVDVAYRRGYFDEEMNRVLADPSDDTKGFFDPNTHENLTYVQLLRRCVPDPDTGLYMLQLAGRGSAVHQLSEELRCALRDARVTPGSGALQGQSVSVWELLFYREVSEDRRQDLLSRYRASTLTVEELGATLTSLLAQAQAQARAEAEAGSPRPDPREALRAATMEVKVGRLRGRAVPVWDVLASGYVSRAAREELLAEFGSGTLDLPALTRRLTAIIEEAEEAPGARPQLQDAWRGPREPGPAGRGDGDSGRSQREGQGEGETQEAAAATAAARRQEQTLRDATMEVQRGQFQGRPVSVWDVLFSSYLSEARRDELLAQHAAGALGLPDLVAVLTRVIEETEERLSKVSFRGLRRQVSASELHTSGILGPETLRDLAQGTKTLQEVTEMDSVKRYLEGTSCIAGVLVPAKDQPGRQEKMSIYQAMWKGVLRPGTALVLLEAQAATGFVIDPVRNLRLSVEEAVAAGVVGGEIQEKLLSAERAVTGYTDPYTGQQISLFQAMQKDLIVREHGIRLLEAQIATGGVIDPVHSHRVPVDVAYRRGYFDEEMNRVLADPSDDTKGFFDPNTHENLTYVQLLRRCVPDPDTGLYMLQLAGRGSAVHQLSEELRCALRDARVTPGSGALQGQSVSVWELLFYREVSEDRRQDLLSRYRAGTLTVEELGATLTSLLAQAQAQARAEAEAGSPRPDPREALRAATMEVKVGRLRGRAVPVWDVLASGYVSGAAREELLAEFGSGTLDLPALTRRLTAIIEEAEEAPGARPQLQDAWRGPREPGPAGRGDGDSGRSQREGQGEGETQEAAAAAAAARRQEQTLRDATMEVQRGQFQGRPVSVWDVLFSSYLSEARRDELLAQHAAGALGLPDLVAVLTRVIEETEERLSKVSFRGLRRQVSASELHTSGILGPETLRDLAQGTKTLQEVTEMDSVKRYLEGTSCIAGVLVPAKDQPGRQEKMSIYQAMWKGVLRPGTALVLLEAQAATGFVIDPVRNLRLSVEEAVAAGVVGGEIQEKLLSAERAVTGYTDPYTGQQISLFQAMQKDLIVREHGIRLLEAQIATGGVIDPVHSHRVPVDVAYRRGYFDEEMNRVLADPSDDTKGFFDPNTHENLTYLQLLQRATLDPETGLLFLSLSLQ

SEQ ID NO: 759 - protein, 854 aa, Homo sapiens; identical to SEQ ID NO: 700

SEQ ID NO: 760 - protein, 1052 aa, Homo sapiens; identical to SEQ ID NO: 699

SEQ ID NO: 761 - protein, 427 aa, Homo sapiens [sequence omitted]

SEQ ID NO: 762 - protein, 300 aa, Homo sapiens [sequence omitted]

SEQ ID NO: 763 - protein, 293 aa, Homo sapiens
MATFSGPAGPILSLNPQEDVEFQKEVAQVRKRITQRKKQEQLTPGVVYVRHLPNLLDETQIFSYFSQFGTVTRFRLSRSKRTGNSKGYAFVEFESEDVAKIVAETMNNYLFGERLLECHFMPPEKVHKELFKDWNIPFKQPSYQSVKRYNRNRTLTQKLRMEERFKKKERLLRKKLAKKGIDYDFPSLILQKTESISKTNRQTSTKGQVLRKKKKKVSGTLDTPEKTVDSQGPTPVCTPTFLERRKSQVAELNDDDKDDEIVFKQPISCVKEEIQETQTPTHSRKKRRRSSNQ

SEQ ID NO: 764 - protein, 142 aa, Homo sapiens
MSLMVSAGRGLGAVWSPTHVQVTVLQARGLRAKGPGGTSDAYAVIQVGKEKYATSVSERSLGAPVWREEATFELPSLLSSGPAAAATLQLTVLHRALLGLDKFLGRAEVDLRDLHSSLGKSFFKTLKKRAWAIFLRLCLKKN

SEQ ID NO: 765 - protein, 514 aa, Homo sapiens
MSISSDEVNFLVYRYLQESGFSHSAFTFGIESHISQSNINGALVPPAALISIIQKGLQYVEAEVSINEDGTLFDGRPIESLSLIDAVMPDVVQTRQQAYRDKLAQQQAAAAAAAAAAASQQGSAKNGENTANGEENGAHTIANNHTDMMEVDGDVEIPPNKAVVLRGHESEVFICAWNPVSDLLASGSGDSTARIWNLSENSTSGSTQLVLRHCIREGGQDVPSNKDVTSLDWNSEGTLLATGSYDGFARIWTKDGNLASTLGQHKGPIFALKWNKKGNFILSAGVDKTTIIWDAHTGEAKQQFPFHSAPALDVDWQSNNTFASCSTDMCIHVCKLGQDRPIKTFQGHTNEVNAIKWDPTGNLLASCSDDMTLKIWSMKQDNCVHDLQAHNKEIYTIKWSPTGPGTNNPNANLMLASASFDSTVRLWDVDRGICIHTLTKHQEPVYSVAFSPDGRYLASGSFDKCVHIWNTQTGALVHSYRGTGGIFEVCWNAAGDKVGASASDGSVCVLDLRK

SEQ ID NO: 766 - protein, 541 aa, Homo sapiens
MVADPPRDSKGLAAAEPTANGGLALASIEDQGAAAGGYCGSRDQVRRCLRANLLVLLTVVAVVAGVALGLGVSGAGGALALGPERLSAFVFPGELLLRLLRMIILPLVVCSLIGGAASLDPGALGRLGAWALLFFLVTTLLASALGVGLALALQPGAASAAINASVGAAGSAENAPSKEVLDSFLDLARNIFPSNLVSAAFRSYSTTYEERNITGTRVKVPVGQEVEGMNILGLVVFAIVFGVALRKLGPEGELLIRFFNSFNEATMVLVSWIMWYAPVGIMFLVAGKIVEMEDVGLLFARLGKYILCCLLGHAIHGLLVLPLIYFLFTRKNPYRFLWGIVTPLATAFGTSSSSATLPLMMKCVEENNGVAKHISRFILPIGATVNMDGAALFQCVAAVFIAQLSQQSLDFVKIITILVTATASSVGAAGIPAGGVLTLAIILEAVNLPVDHISLILAVDWLVDRSCTVLNVEGDALGAGLLQNYVDRTESRSTEPELIQVKSELPLDPLPVPTEEGNPLLKHYRGPAGDATVASEKESVM

SEQ ID NO: 767 - protein, 722 aa, Homo sapiens
MPLHQLGDKPLTFPSPNSAMENGLDHTPPSRRASPGTPLSPGSLRSAAHSPLDTSKQPLCQLWAEKHGARGTHEVRYISAGQSVACGWWAFAPPCLQVLNTPKGILFFLCAAAFLQGMTVNGFINTVITSLERRYDLHSYQSGLIASSYDIAACLCLTFVSYFGGSGHKPRWLGWGVLLMGTGSLVFALPHFTAGRYEVELDAGVRTCPANPGAVCADSTSGLSRYQLVFMLGQFLHGVGATPLYTLGVTYLDENVKSSCSPVYIAIFYTAAILGPAAGYLIGGALLNIYTEMGRRTELTTESPLWVGAWWVGFLGSGAAAFFTAVPILGYPRQLPGSQRYAVMRAAEMHQLKDSSRGEASNPDFGKTIRDLPLSIWLLLKNPTFILLCLAGATEATLITGMSTFSPKFLESQFSLSASEAATLFGYLVVPAGGGGTFLGGFFVNKLRLRGSAVIKFCLFCTVVSLLGILVFSLHCPSVPMAGVTASYGGSLLPEGHLNLTAPCNAACSCQPEHYSPVCGSDGLMYFSLCHAGCPAATETNVDGQKVYRDCSCIPQNLSSGFGHATAGKCTSTCQRKPLLLVFIFVVIFFTFLSSIPALTATLRCVRDPQRSFALGIQWIVVRILGGIPGPIAFGWVIDKACLLWQDQCGQQGSCLVYQNSAMSRYILIMGLLYKVLGVLFFAIACFLYKPLSESSDGLETCLPSQSSAPDSATDSQLQSSV

SEQ ID NO: 768 - protein, 495 aa, Homo sapiens
MRSPVRDLARNDGEESTDRTPLLPGAPRAEAAPVCCSARYNLAILAFFGFFIVYALRVNLSVALVDMVDSNTTLEDNRTSKACPEHSAPIKVHHNQTGKKYQWDAETQGWILGSFFYGYIITQIPGGYVASKIGGKMLLGFGILGTAVLTLFTPIAADLGVGPLIVLRALEGLGEGVTFPAMHAMWSSWAPPLERSKLLSISYAGAQLGTVISLPLSGIICYYMNWTYVFYFFGTIGIFWFLLWIWLVSDTPQKHKRISHYEKEYILSSLRNQLSSQKSVPWVPILKSLPLWAIVVAHFSYNWTFYTLLTLLPTYMKEILRFNVQENGFLSSLPYLGSWLCMILSGQAADNLRAKWNFSTLCVRRIFSLIGMIGPAVFLVAAGFIGCDYSLAVAFLTISTTLGGFCSSGFSINHLDIAPSYAGILLGITNTFATIPGMVGPVIAKSLTPDNTVGEWQTVFYIAAAINVFGAIFFTLFAKGEVQNWALNDHHGHRH

SEQ ID NO: 769 - protein, 135 aa, Homo sapiens
MACGLVASNLNLKPGECLRVRGEVAPDAKSFVLNLGKDSNNLCLHFNPRFNAHGDANTIVCNSKDGGAWGTEQREAVFPFQPGSVAEVCITFDQANLTVKLPDGYEFKFPNRLNLEAINYMAADGDFKIKCVAFD

SEQ ID NO: 770 - protein, 999 aa, Homo sapiens
MMGLFPRTTGALAIFVVVILVHGELRIETKGQYDEEEMTMQQAKRRQKREWVKFAKPCREGEDNSKRNPIAKITSDYQATQKITYRISGVGIDQPPFGIFVVDKNTGDINITAIVDREETPSFLITCRALNAQGLDVEKPLILTVKILDINDNPPVFSQQIFMGEIEENSASNSLVMILNATDADEPNHLNSKIAFKIVSQEPAGTPMFLLSRNTGEVRTLTNSLDREQASSYRLVVSGADKDGEGLSTQCECNIKVKDVNDNFPMFRDSQYSARIEENILSSELLRFQVTDLDEEYTDNWLAVYFFTSGNEGNWFEIQTDPRTNEGILKVVKALDYEQLQSVKLSIAVKNKAEFHQSVISRYRVQSTPVTIQVINVREGIAFRPASKTFTVQKGISSKKLVDYILGTYQAIDEDTNKAASNVKYVMGRNDGGYLMIDSKTAEIKFVKNMNRDSTFIVNKTITAEVLAIDEYTGKTSTGTVYVRVPDFNDNCPTAVLEKDAVCSSSPSVVVSARTLNNRYTGPYTFALEDQPVKLPAVWSITTLNATSALLRAQEQIPPGVYHISLVLTDSQNNRCEMPRSLTLEVCQCDNRGICGTSYPTTSPGTRYGRPHSGRLGPAAIGLLLLGLLLLLLAPLLLLTCDCGAGSTGGVTGGFIPVPDGSEGTIHQWGIEGAHPEDKEITNICVPPVTANGADFMESSEVCTNTYARGTAVEGTSGMEMTTKLGAATESGGAAGFATGTVSGAASGFGAATGVGICSSGQSGTMRTRHSTGGTNKDYADGAISMNFLDSYFSQKAFACAEEDDGQEANDCLLIYDNEGADATGSPVGSVGCCSFIADDLDDSFLDSLGPKFKKLAEISLGVDGEGKEVQPPSKDSGYGIESCGHPIEVQQTGFVKCQTLSGSQGASALSASGSVQPAVSIPDPLQHGNYLVTETYSASGSLVQPSTAGFDPLLTQNVIVTERVICPISSVPGNLAGPTQLRGSHTMLCTEDPCSRLI

SEQ ID NO: 771 - protein, 1224 aa, Homo sapiens
MEPLLLGRGLIVYLMFLLLKFSKAIEIPSSVQQVPTIIKQSKVQVAFPFDEYFQIECEAKGNPEPTFSWTKDGNPFYFTDHRIIPSNNSGTFRIPNEGHISHFQGKYRCFASNKLGIAMSEEIEFIVPSVPKFPKEKIDPLEVEEGDPIVLPCNPPKGLPPLHIYWMNIELEHIEQDERVYMSQKGDLYFANVEEKDSRNDYCCFAAFPRLRTIVQKMPMKLTVNSLKHANDSSSSTEIGSKANSIKQRKPKLLLPPTESGSESSITILKGEILLLECFAEGLPTPQVDWNKIGGDLPKGREAKENYGKTLKIENVSYQDKGNYRCTASNFLGTATHDFHVIVEEPPRWTKKPQSAVYSTGSNGILLCEAEGEPQPTIKWRVNGSPVDNHPFAGDVVFPREISFTNLQPNHTAVYQCEASNVHGTILANANIDVVDVRPLIQTKDGENYATVVGYSAFLHCEFFASPEAVVSWQKVEEVKPLEGRRYHIYENGTLQINRTTEEDAGSYSCWVENAIGKTAVTANLDIRNATKLRVSPKNPRIPKLHMLELHCESKCDSHLKHSLKLSWSKDGEAFEINGTEDGRIIIDGANLTISNVTLEDQGIYCCSAHTALDSAADITQVTVLDVPDPPENLHLSERQNRSVRLTWEAGADHNSNISEYIVEFEGNKEEPGRWEELTRVQGKKTTVILPLAPFVRYQFRVIAVNEVGRSQPSQPSDHHETPPAAPDRNPQNIRVQASQPKEMIIKWEPLKSMEQNGPGLEYRVTWKPQGAPVEWEEETVTNHTLRVMTPAVYAPYDVKVQAINQLGSGPDPQSVTLYSGEDYPDTAPVIHGVDVINSTLVKVTWSTVPKDRVHGRLKGYQINWWKTKSLLDGRTHPKEVNILRFSGQRNSGMVPSLDAFSEFHLTVLAYNSKGAGPESEPYIFQTPEGVPEQPTFLKVIKVDKDTATLSWGLPKKLNGNLTGYLLQYQIINDTYEIGELNDINITTPSKPSWHLSNLNATTKYKFYLRACTSQGCGKPITEESSTLGEGSKGIGKISGVNLTQKTHPVEVFEPGAEHIVRLMTKNWGDNDSIFQDVIETRGREYAGLYDDISTQGWFIGLMCAIALLTLLLLTVCFVKRNRGGKYSVKEKEDLHPDPEIQSVKDETFGEYSDSDEKPLKGSLRSLNRDMQPTESADSLVEYGEGDHGLFSEDGSFIGAYAGSKEKGSVESNGSSTATFPLRA

SEQ ID NO: 772 - protein, 128 aa, Homo sapiens
MRTALLLLAALAVATGPALTLRCHVCTSSSNCKHSVVCPASSRFCKTTNTVEPLRGNLVKKDCAESCTPSYTLQGQVSSGTSSTQCCQEDLCNEKLHNAAPTRTALAHSALSLGLALSLLAVILAPSL

SEQ ID NO: 773 - protein, 3396 aa, Homo sapiens
MFINIKSILWMCSTLIVTHALHKVKVGKSPPVRGSLSGKVSLPCHFSTMPTLPPSYNTSEFLRIKWSKIEVDKNGKDLKETTVLVAQNGNIKIGQDYKGRVSVPTHPEAVGDASLTVVKLLASDAGLYRCDVMYGIEDTQDTVSLTVDGVVFHYRAATSRYTLNFEAAQKACLDVGAVIATPEQLFAAYEDGFEQCDAGWLADQTVRYPIRAPRVGCYGDKMGKAGVRTYGFRSPQETYDVYCYVDHLDGDVFHLTVPSKFTFEEAAKECENQDARLATVGELQAAWRNGFDQCDYGWLSDASVRHPVTVARAQCGGGLLGVRTLYRFENQTGFPPPDSRFDAYCFKPKEATTIDLSILAETASPSLSKEPQMVSDRTTPIIPLVDELPVIPTEFPPVGNIVSFEQKATVQPQAITDSLATKLPTPTGSTKKPWDMDDYSPSASGPLGKLDISEIKEEVLQSTTGVSHYATDSWDGVVEDKQTQESVTQIEQIEVGPLVTSMEILKHIPSKEFPVTETPLVTARMILESKTEKKMVSTVSELVTTGHYGFTLGEEDDEDRTLTVGSDESTLIFDQIPEVITVSKTSEDTIHTHLEDLESVSASTTVSPLIMPDNNGSSMDDWEERQTSGRITEEFLGKYLSTTPFPSQHRTEIELFPYSGDKILVEGISTVIYPSLQTEMTHRRERTETLIPEMRTDTYTDEIQEEITKSPFMGKTEEEVFSGMKLSTSLSEPIHVTESSVEMTKSFDFPTLITKLSAEPTEVRDMEEDFTATPGTTKYDENITTVLLAHGTLSVEAATVSKWSWDEDNTTSKPLESTEPSASSKLPPALLTTVGMNGKDKDIPSFTEDGADEFTLIPDSTQKQLEEVTDEDIAAHGKFTIRFQPTTSTGIAEKSTLRDSTTEEKVPPITSTEGQVYATMEGSALGEVEDVDLSKPVSTVPQFAHTSEVEGLAFVSYSSTQEPTTYVDSSHTIPLSVIPKTDWGVLVPSVPSEDEVLGEPSQDILVIDQTRLEATISPETMRTTKITEGTTQEEFPWKEQTAEKPVPALSSTAWTPKEAVTPLDEQEGDGSAYTVSEDELLTGSERVPVLETTPVGKIDHSVSYPPGAVTEHKVKTDEVVTLTPRIGPKVSLSPGPEQKYETEGSSTTGFTSSLSPFSTHITQLMEETTTEKTSLEDIDLGSGLFEKPKATELIEFSTIKVTVPSDITTAFSSVDRLHTTSAFKPSSAITKKPPLIDREPGEETTSDMVIIGESTSHVPPTTLEDIVAKETETDIDREYFTTSSPPATQPTRPPTVEDKEAFGPQALSTPQPPASTKFHPDINVYIIEVRENKTGRMSDLSVIGHPIDSESKEDEPCSEETDPVHDLMAEILPEFPDIIEIDLYHSEENEEEEEECANATDVTTTPSVQYINGKHLVTTVPKDPEAAEARRGQFESVAPSQNFSDSSESDTHPFVIAKTELSTAVQPNESTETTESLEVTWKPETYPETSEHFSGGEPDVFPTVPFHEEFESGTAKKGAESVTERDTEVGHQAHEHTEPVSLFPEESSGEIAIDQESQKIAFARATEVTFGEEVEKSTSVTYTPTIVPSSASAYVSEEEAVTLIGNPWPDDLLSTKESWVEATPRQVVELSGSSSIPITEGSGEAEEDEDTMFTMVTDLSQRNTTDTLITLDTSRIITESFFEVPATTIYPVSEQPSAKVVPTKFVSETDTSEWISSTTVEEKKRKEEEGTTGTASTFEVYSSTQRSDQLILPFELESPNVATSSDSGTRKSFMSLTTPTQSEREMTDSTPVFTETNTLENLGAQTTEHSSIHQPGVQEGLTTLPRSPASVFMEQGSGEAAADPETTTVSSFSLNVEYAIQAEKEVAGTLSPHVETTFSTEPTGLVLSTVMDRVVAENITQTSREIVISERLGEPNYGAEIRGFSTGFPLEEDFSGDFREYSTVSHPIAKEETVMMEGSGDAAFRDTQTSPSTVPTSVHISHISDSEGPSSTMVSTSAFPWEEFTSSAEGSGEQLVTVSSSVVPVLPSAVQKFSGTASSIIDEGLGEVGTVNEIDRRSTILPTAEVEGTKAPVEKEEVKVSGTVSTNFPQTIEPAKLWSRQEVNPVRQEIESETTSEEQIQEEKSFESPQNSPATEQTIFDSQTFTETELKTTDYSVLTTKKTYSDDKEMKEEDTSLVNMSTPDPDANGLESYTTLPEATEKSHFFLATALVTESIPAEHVVTDSPIKKEESTKHFPKGMRPTIQESDTELLFSGLGSGEEVLPTLPTESVNFTEVEQINNTLYPHTSQVESTSSDKIEDFNRMENVAKEVGPLVSQTDIFEGSGSVTSTTLIEILSDTGAEGPTVAPLPFSTDIGHPQNQTVRWAEEIQTSRPQTITEQDSNKNSSTAEINETTTSSTDFLARAYGFEMAKEFVTSAPKPSDLYYEPSGEGSGEVDIVDSFHTSATTQATRQESSTTFVSDGSLEKHPEVPSAKAVTADGFPTVSVMLPLHSEQNKSSPDPTSTLSNTVSYERSTDGSFQDRFREFEDSTLKPNRKKPTENIIIDLDKEDKDLILTITESTILEILPELTSDKNTIIDIDHTKPVYEDILGMQTDIDTEVPSEPHDSNDESNDDSTQVQEIYEAAVNLSLTEETFEGSADVLASYTQATHDESMTYEDRSQLDHMGFHFTTGIPAPSTETELDVLLPTATSLPIPRKSATVIPEIEGIKAEAKALDDMFESSTLSDGQAIADQSEIIPTLGQFERTQEEYEDKKHAGPSFQPEFSSGAEEALVDHTPYLSIATTHLMDQSVTEVPDVMEGSNPPYYTDTTLAVSTFAKLSSQTPSSPLTIYSGSEASGHTEIPQPSALPGIDVGSSVMSPQDSFKEIHVNIEATFKPSSEEYLHITEPPSLSPDTKLEPSEDDGKPELLEEMEASPTELIAVEGTEILQDFQNKTDGQVSGEAIKMFPTIKTPEAGTVITTADEIELEGATQWPHSTSASATYGVEAGVVPWLSPQTSERPTLSSSPEINPETQAALIRGQDSTIAASEQQVAARILDSNDQATVNPVEFNTEVATPPFSLLETSNETDFLIGINEESVEGTAIYLPGPDRCKMNPCLNGGTCYPTETSYVCTCVPGYSGDQCELDFDECHSNPCRNGATCVDGFNTFRCLCLPSYVGALCEQDTETCDYGWHKFQGQCYKYFAHRRTWDAAERECRLQGAHLTSILSHEEQMFVNRVGHDYQWIGLNDKMFEHDFRWTDGSTLQYENWRPNQPDSFFSAGEDCVVIIWHENGQWNDVPCNYHLTYTCKKGTVACGQPPVVENAKTFGKMKPRYEINSLIRYHCKDGFIQRHLPTIRCLGNGRWAIPKITCMNPSAYQRTYSMKYFKNSSSAKDNSINTSKHDHRWSRRWQESRR

SEQ ID NO: 774 - protein, 310 aa, Homo sapiens
MRRAALWLWLCALALSLQPALPQIVATNLPPEDQDGSGDDSDNFSGSGAGALQDITLSQQTPSTWKDTQLLTAIPTSPEPTGLEATAASTSTLPAGEGPKEGEAVVLPEVEPGLTAREQEATPRPRETTQLPTTHQASTTTATTAQEPATSHPHRDMQPGHHETSTPAGPSQADLHTPHTEDGGPSATERAAEDGASSQLPAAEGSGEQDFTFETSGENTAVVAVEPDRRNQSPVDQGATGASQGLLDRKEVLGGVIAVGLVGLIFAVCLVGFMLYRMKKKDEGSYSLEEPKQANGGAYQKPTKQEEFYA

SEQ ID NO: 775 - protein, 228 aa, Homo sapiens
MASTASEIIAFMVSISGWVLVSSTLPTDYWKVSTIDGTVITTATYWANLWKACVTDSTGVSNCKDFPSMLALDGYIQACRGLMIAAVSLGFFGSIFALFGMKCTKVGGSDKAKAKIACLAGIVFILSGLCSMTGCSLYANKITTEFFDPLFVEQKYELGAALFIGWAGASLCIIGGVIFCFSISDNNKTPRYTYNGATSVMSSRTKYHGGEDFKTTNPSKQFDKNAYV

SEQ ID NO: 776 - protein, 397 aa, Homo sapiens
MAPISLSWLLRLATFCHLTVLLAGQHHGVTKCNITCSKMTSKIPVALLIHYQQNQASCGKRAIILETRQHRLFCADPKEQWVKDAMQHLDRQAAALTRNGGTFEKQIGEVKPRTTPAAGGMDESVVLEPEATGESSSLEPTPSSQEAQRALGTSPELPTGVTGSSGTRLPPTPKAQDGGPVGTELFRVPPVSTAATWQSSAPHQPGPSLWAEAKTSEAPSTQDPSTQASTASSPAPEENAPSEGQRVWGQGQSPRPENSLEREEMGPVPAHTDAFQDWGPGSMAHVSVVPVSSEGTPSREPVASGSWTPKAEEPIHATMDPQRLGVLITPVPDAQAATRRQAVGLLAFLGLLFCLGVAMFTYQSLQGCPRKMAGEMAEGLRYIPRSCGSNSYVLVPV

SEQ ID NO: 777 - protein, 683 aa, Homo sapiens
MALFVRLLALALALALGPAATLAGPAKSPYQLVLQHSRLRGRQHGPNVCAVQKVIGTNRKYFTNCKQWYQRKICGKSTVISYECCPGYEKVPGEKGCPAALPLSNLYETLGVVGSTTTQLYTDRTEKLRPEMEGPGSFTIFAPSNEAWASLPAEVLDSLVSNVNIELLNALRYHMVGRRVLTDELKHGMTLTSMYQNSNIQIHHYPNGIVTVNCARLLKADHHATNGVVHLIDKVISTITNNIQQIIEIEDTFETLRAAVAASGLNTMLEGNGQYTLLAPTNEAFEKIPSETLNRILGDPEALRDLLNNHILKSAMCAEAIVAGLSVETLEGTTLEVGCSGDMLTINGKAIISNKDILATNGVIHYIDELLIPDSAKTLFELAAESDVSTAIDLFRQAGLGNHLSGSERLTLLAPLNSVFKDGTPPIDAHTRNLLRNHIIKDQLASKYLYHGQTLETLGGKKLRVFVYRNSLCIENSCIAAHDKRGRYGTLFTMDRVLTPPMGTVMDVLKGDNRFSMLVAAIQSAGLTETLNREGVYTVFAPTNEAFRALPPRERSRLLGDAKELANILKYHIGDEILVSGGIGALVRLKSLQGDKLEVSLKNNVVSVNKEPVAEPDIMATNGVVHVITNVLQPPANRPQERGDELADSALEIFKQASAFSRASQRSVRLAPVYQKLLERMKH

SEQ ID NO: 778 - protein, 654 aa, Homo sapiens [sequence omitted]

SEQ ID NO: 779 - protein, 825 aa, Homo sapiens
MPAPIRLRELIRTIRTARTQAEEREMIQKECAAIRSSFREEDNTYRCRNVAKLLYMHMLGYPAHFGQLECLKLIASQKFTDKRIGYLGAMLLLDERQDVHLLMTNCIKNDLNHSTQFVQGLALCTLGCMGSSEMCRDLAGEVEKLLKTSNSYLRKKAALCAVHVIRKVPELMEMFLPATKNLLNEKNHGVLHTSVVLLTEMCERSPDMLAHFRKSLQLVPQLVRILKNLIMSGYSPEHDVSGISDPFLQVRILRLLRILGRNDDDSSEAMNDILAQVATNTETSKNVGNAILYETVLTIMDIKSESGLRVLAINILGRFLLNNDKNIRYVALTSLLKTVQTDHNAVQRHRSTIVDCLKDLDVSIKRRAMELSFALVNGNNIRGMMKELLYFLDSCEPEFKADCASGIFLAAEKYAPSKRWHIDTIMRVLTTAGSYVRDDAVPNLIQLITNSVEMHAYTVQRLYKAILGDYSQQPLVQVAAWCIGEYGDLLVSGQCEEEEPIQVTEDEVLDILESVLISNMSTSVTRGYALTAIMKLSTRFTCTVNRIKKVVSIYGSSIDVELQQRAVEYNALFKKYDHMRSALLERMPVMEKVTTNGPTEIVQTNGETEPAPLETKPPPSGPQPTSQANDLLDLLGGNDITPVIPTAPTSKPSSAGGELLDLLGDINLTGAPAAAPAPASVPQISQPPFLLDGLSSQPLFNDIAAGIPSITAYSKNGLKIEFTFERSNTNPSVTVITIQASNSTELDMTDFVFQAAVPKTFQLQLLSPSSSIVPAFNTGTITQVIKVLNPQKQQLRMRIKLTYNHKGSAMQDLAEVNNFPPQSWQ

SEQ ID NO: 780 - protein, 222 aa, Homo sapiens
MAARPKLHYPNGRGRMESVRWVLAAAGVEFDEEFLETKEQLYKLQDGNHLLFQQVPMVEIDGMKLVQTRSILHYIADKHNLFGKNLKERTLIDMYVEGTLDLLELLIMHPFLKPDDQQKEVVNMAQKAIIRYFPVFEKILRGHGQSFLVGNQLSLADVILLQTILALEEKIPNILSAFPFLQEYTVKLSNIPTIKRFLEPGSKKKPPPDEIYVRTVYNIFRP

SEQ ID NO: 781 - protein, 323 aa, Homo sapiens
MDSKYQCVKLNDGHFMPVLGFGTYAPAEVPKSKALEAVKLAIEAGFHHIDSAHVYNNEEQVGLAIRSKIADGSVKREDIFYTSKLWSNSHRPELVRPALERSLKNLQLDYVDLYLIHFPVSVKPGEEVIPKDENGKILFDTVDLCATWEAMEKCKDAGLAKSIGVSNFNHRLLEMILNKPGLKYKPVCNQVECHPYFNQRKLLDFCKSKDIVLVAYSALGSHREEPWVDPNSPVLLEDPVLCALAKKHKRTPALIALRYQLQRGVVVLAKSYNEQRIRQNVQVFEFQLTSEEMKAIDGLNRNVRYLTLDIFAGPPNYPFSDEY

SEQ ID NO: 782 - protein, 375 aa, Homo sapiens
MSTAGKVIKCKAAVLWELKKPFSIEEVEVAPPKAHEVRIKMVAVGICGTDDHVVSGTMVTPLPVILGHEAAGIVESVGEGVTTVKPGDKVIPLAIPQCGKCRICKNPESNYCLKNDVSNPQGTLQDGTSRFTCRRKPIHHFLGISTFSQYTVVDENAVAKIDAASPLEKVCLIGCGFSTGYGSAVNVAKVTPGSTCAVFGLGGVGLSAIMGCKAAGAARIIAVDINKDKFAKAKELGATECINPQDYKKPIQEVLKEMTDGGVDFSFEVIGRLDTMMASLLCCHEACGTSVIVGVPPDSQNLSMNPMLLLTGRTWKGAILGGFKSKECVPKLVADFMAKKFSLDALITHVLPFEKINEGFDLLHSGKSIRTILMF

SEQ ID NO: 783 - protein, 471 aa, Homo sapiens
MAKKVAVIGAGVSGLISLKCCVDEGLEPTCFERTEDIGGVWRFKENVEDGRASIYQSVVTNTSKEMSCFSDFPMPEDFPNFLHNSKLLEYFRIFAKKFDLLKYIQFQTTVLSVRKCPDFSSSGQWKVVTQSNGKEQSAVFDAVMVCSGHHILPHIPLKSFPGMERFKGQYFHSRQYKHPDGFEGKRILVIGMGNSGSDIAVELSKNAAQVFISTRHGTWVMSRISEDGYPWDSVFHTRFRSMLRNVLPRTAVKWMIEQQMNRWFNHENYGLEPQNKYIMKEPVLNDDVPSRLLCGAIKVKSTVKELTETSAIFEDGTVEENIDVIIFATGYSFSFPFLEDSLVKVENNMVSLYKYIFPAHLDKSTLACIGLIQPLGSIFPTAELQARWVTRVFKGLCSLPSERTMMMDIIKRNEKRIDLFGESQSQTLQTNYVDYLDELALEIGAKPDFCSLLFKDPKLAVRLYFGPCNSY

SEQ ID NO: 784 - protein, 817 aa, Homo sapiens
MMDGPRSDVGRWGGNPLQPPTTPSPEPEPEPDGRSRRGGGRSFWARCCGCCSCRNAADDDWGPEPSDSRGRGSSSGTRRPGSRGSDSRRPVSRGSGVNAAGDGTIREGMLVVNGVDLLSSRSDQNRREHHTDEYEYDELIVRRGQPFHMLLLLSRTYESSDRITLELLIGNNPEVGKGTHVIIPVGKGGSGGWKAQVVKASGQNLNLRVHTSPNAIIGKFQFTVRTQSDAGEFQLPFDPRNEIYILFNPWCPEDIVYVDHEDWRQEYVLNESGRIYYGTEAQIGERTWNYGQFDHGVLDACLYILDRRGMPYGGRGDPVNVSRVISAMVNSLDDNGVLIGNWSGDYSRGTNPSAWVGSVEILLSYLRTGYSVPYGQCWVFAGVTTTVLRCLGLATRTVTNFNSAHDTDTSLTMDIYFDENMKPLEHLNHDSVWNFHVWNDCWMKRPDLPSGFDGWQVVDATPQETSSGIFCCGPCSVESIKNGLVYMKYDTPFIFAEVNSDKVYWQRQDDGSFKIVYVEEKAIGTLIVTKAISSNMREDITYLYKHPEGSDAERKAVETAAAHGSKPNVYANRGSAEDVAMQVEAQDAVMGQDLMVSVMLINHSSSRRTVKLHLYLSVTFYTGVSGTIFKETKKEVELAPGASDRVTMPVAYKEYRPHLVDQGAMLLNVSGHVKESGQVLAKQHTFRLRTPDLSLTLLGAAVVGQECEVQIVFKNPLPVTLTNVVFRLEGSGLQRPKILNVGDIGGNETVTLRQSFVPVRPGPRQLIASLDSPQLSQVHGVIQVDVAPAPGDGGFFSDAGGDSHLGETIPMASRGGA

SEQ ID NO: 785 - protein, 375 aa, Homo sapiens
MSTAGKVIKCKAAVLWELKKPFSIEEVEVAPPKAHEVRIKMVAAGICRSDEHVVSGNLVTPLPVILGHEAAGIVESVGEGVTTVKPGDKVIPLFTPQCGKCRICKNPESNYCLKNDLGNPRGTLQDGTRRFTCSGKPIHHFVGVSTFSQYTVVDENAVAKIDAASPLEKVCLIGCGFSTGYGSAVKVAKVTPGSTCAVFGLGGVGLSVVMGCKAAGAARIIAVDINKDKFAKAKELGATECINPQDYKKPIQEVLKEMTDGGVDFSFEVIGRLDTMMASLLCCHEACGTSVIVGVPPDSQNLSINPMLLLTGRTWKGAIFGGFKSKESVPKLVADFMAKKFSLDALITNILPFEKINEGFDLLRSGKSIRTVLTF

SEQ ID NO: 786 - protein, 354 aa, Homo sapiens
MPRRSLHAAAVLLLVILKEQPSSPAPVNGSKWTYFGPDGENSWSKKYPSCGGLLQSPIDLHSDILQYDASLTPLEFQGYNLSANKQFLLTNNGHSVKLNLPSDMHIQGLQSRYSATQLHLHWGNPNDPHGSEHTVSGQHFAAELHIVHYNSDLYPDASTASNKSEGLAVLAVLIEMGSFNPSYDKIFSHLQHVKYKGQEAFVPGFNIEELLPERTAEYYRYRGSLTTPPCNPTVLWTVFRNPVQISQEQLLALETALYCTHMDDPSPREMINNFRQVQKFDERLVYTSFSQVQVCTAAGLSLGIILSLALAGILGICIVVVVSIWLFRRKSIKKGDNKGVIYKPATKMETEAHA

SEQ ID NO: 787 - protein, 516 aa, Homo sapiens
MEPAVSLAVCALLFLLWVRLKGLEFVLIHQRWVFVCLFLLPLSLIFDIYYYVRAWVVFKLSSAPRLHEQRVRDIQKQVREWKEQGSKTFMCTGRPGWLTVSLRVGKYKKTHKNIMINLMDILEVDTKKQIVRVEPLVTMGQVTALLTSIGWTLPVLPELDDLTVGGLIMGTGIESSSHKYGLFQHICTAYELVLADGSFVRCTPSENSDLFYAVPWSCGTLGFLVAAEIRIIPAKKYVKLRFEPVRGLEAICAKFTHESQRQENHFVEGLLYSLDEAVIMTGVMTDEAEPSKLNSIGNYYKPWFFKHVENYLKTNREGLEYIPLRHYYHRHTRSIFWELQDIIPFGNNPIFRYLFGWMVPPKISLLKLTQGETLRKLYEQHHVVQDMLVPMKCLQQALHTFQNDIHVYPIWLCPFILPSQPGLVHPKGNEAELYIDIGAYGEPRVKHFEARSCMRQLEKFVRSVHGFQMLYADCYMNREEFWEMFDGSLYHKLREKLGCQDAFPEVYDKICKAARH

SEQ ID NO: 788 - protein, 847 aa, Homo sapiens
MAKPLTDQEKRRQISIRGIVGVENVAELKKSFNRHLHFTLVKDRNVATTRDYYFALAHTVRDHLVGRWIRTQQHYYDKCPKRVYYLSLEFYMGRTLQNTMINLGLQNACDEAIYQLGLDIEELEEIEEDAGLGNGGLGRLAACFLDSMATLGLAAYGYGIRYEYGIFNQKIRDGWQVEEADDWLRYGNPWEKSRPEFMLPVHFYGKVEHTNTGTKWIDTQVVLALPYDTPVPGYMNNTVNTMRLWSARAPNDFNLRDFNVGDYIQAVLDRNLAENISRVLYPNDNFFEGKELRLKQEYFVVAATLQDIIRRFKASKFGSTRGAGTVFDAFPDQVAIQLNDTHPALAIPELMRIFVDIEKLPWSKAWELTQKTFAYTNHTVLPEALERWPVDLVEKLLPRHLEIIYEINQKHLDRIVALFPKDVDRLRRMSLIEEEGSKRINMAHLCIVGSHAVNGVAKIHSDIVKTKVFKDFSELEPDKFQNKTNGITPRRWLLLCNPGLAELIAEKIGEDYVKDLSQLTKLHSFLGDDVFLRELAKVKQENKLKFSQFLETEYKVKINPSSMFDVQVKRIHEYKRQLLNCLHVITMYNRIKKDPKKLFVPRTVIIGGKAAPGYHMAKMIIKLITSVADVVNNDPMVGSKLKVIFLENYRVSLAEKVIPATDLSEQISTAGTEASGTGNMKFMLNGALTIGTMDGANVEMAEEAGEENLFIFGMRIDDVAALDKKGYEAKEYYEALPELKLVIDQIDNGFFSPKQPDLFKDIINMLFYHDRFKVFADYEAYVKCQDKVSQLYMNPKAWNTMVLKNIAASGKFSSDRTIKEYAQNIWNVEPSDLKISLSNESNKVNGN

SEQ ID NO: 789 - protein, 914 aa, Homo sapiens
KNLLTKVRDAALWLETLSDSRPAKASLSTTSSIADFFLALTICNSVMVSTTTEPRQRVTIKPSSKALGTSLEKIQQLFQKLKLLSLSQSFSSTAPSDTDLGESLGANVATTDSDERDDASVCSGGDSTDDGGYRSSMWDQGDILESGSGTSLEEALEAPATDLARPEFCYEAESPDEAALVHAAHAYSFTLVSRTPEQVTVRLPQGTCLTFSLLCTLGFDSVRKRMSVVVRHPLTGEIVVYTKGADSVIMDLLEDPACVPDINMEKKLRKIRARTQKHLDLYARDGLRTLCIAKKVVSEEDFRRWASFRREAEASLDNRDELLMETAQHLENQLTLLGATGIEDRLQEGVPDTIATLREAGIQLWVLTGDKQETAVNIAHSCRLLNQTDTVYTINTENQETCESILNCALEELKQFRELQKPDRKLFGFRLPSKTPSITSEAVVPEAGLVIDGKTLNAIFQGKLEKKFLELTQYCRSVLCCRSTPLQKSMIVKLVRDKLRVMTLSIGDGANDVSMIQAADIGIGISGQEGMQAVMSSDFAITRFKHLKKLLLVHGHWCYSRLARMVVYYLYKNVCYVNLLFWYQFFCGFSSSTMIDYWQMIFFNLFFTSLPPLVFGVLDKDISAETLLALPELYKSGQNSECYNLSTFWISMVDAFYQSLICFFIPYLAYKGSDIDVFTFGTPINTISLTTILLHQAMEMKTWTIFHGVVLLGSFLMYFLVSLLYNATCVICNSPTNPYWVMEGQLSNPTFYLVCFLTPVVALLPRYFFLSLQGTCGKSLISKAQKIDKLPPDKRNLEIQSWRSRQRPAPVPEVARPTHHPVSSITGQDFSASTPKSSNPPKRKHVEESVLHEQRCGTECMRDDSCSGDSSAQLSSGEHLLGPNRIMAYSRGQTDMCRCSKRSSHRRSQSSLTI

SEQ ID NO: 790 - protein, 455 aa, Homo sapiens
MSSSGLNSEKVAALIQKLNSDPQFVLAQNVGTTHDLLDICLKRATVQRAQHVFQHAVPQEGKPITNQKSSGRCWIFSCLNVMRLPFMKKLNIEEFEFSQSYLFFWDKVERCYFFLSAFVDTAQRKEPEDGRLVQFLLMNPANDGGQWDMLVNIVEKYGVIPKKCFPESYTTEATRRMNDILNHKMREFCIRLRNLVHSGATKGEISATQDVMMEEIFRVVCICLGNPPETFTWEYRDKDKNYQKIGPITPLEFYREHVKPLFNMEDKICLVNDPRPQHKYNKLYTVEYLSNMVGGRKTLYNNQPIDFLKKMVAASIKDGEAVWFGCDVGKHFNSKLGLSDMNLYDHELVFGVSLKNMNKAERLTFGESLMTHAMTFTAVSEKDDQDGAFTKWRVENSWGEDHGHKGYLCMTDEWFSEYVYEVVVDRKHVPEEVLAVLEQEPIILPAWDPMGALAE

SEQ ID NO: 791 - protein, 385 aa, Homo sapiens
MKDEPRSTNLFMKLDSVFIWKEPFGLVLIIAPWNYPLNLTLVLLVGTLPAGNCVVLKPSEISQGTEKVLAEVLPQYLDQSCFAVVLGGPQETGQLLEHKLDYIFFTGSPRVGKIVMTAATKHLTPVTLELGGKNPCYVDDNCDPQTVANRVAWFCYFNAGQTCVAPDYVLCSPEMQERLLPALQSTITRFYGDDPQSSPNLGRIINQKQFQRLRALLGCGRVAIGGQSNESDRYIAPTVLVDVQETEPVMQEEIFGPILPIVNVQSVDEAIKFINRQEKPLALYAFSNSRQVVNQMLERTSSGSFGGNEGFTYISLLSVPFGGVGHSGMGRYHGKFTFDTFSHHRTCLLAPSGLEKLKEIRYPPYTDWNQQLLRWGMGSQSCTLL

SEQ ID NO: 792 - protein, 314 aa, Homo sapiens
MSRVPAFLSAAEVEEHLRSSSLLIPPLETALANFSSGPEGGVMQPVRTVVPVTKHRGYLGVMPAYSAAEDALTTKLVTFYEDRGITSVVPSHQATVLLFEPSNGTLLAVMDGNVITAKRTAAVSAIATKFLKPPSSEVLCILGAGVQAYSHYEIFTEQFSFKEVRIWNRTKENAEKFADTVQGEVRVCSSVQEAVAGADVIITVTLATEPILFGEWVKPGAHINAVGASRPDWRELDDELMKEAVLYVDSQEAALKESGDVLLSGAEIFAELGEVIKGVKPAHCEKTTVFKSLGMAVEDTVAAKLIYDSWSSGK

SEQ ID NO: 793 - protein, 455 aa, Homo sapiens
MWLEILLTSVLGFAIYWFISRDKEETLPLEDGWWGPGTRSAAREDDSIRPFKVETSDEEIHDLHQRIDKFRFTPPLEDSCFHYGFNSNYLKKVISYWRNEFDWKKQVEILNRYPHFKTKIEGLDIHFIHVKPPQLPAGHTPKPLLMVHGWPGSFYEFYKIIPLLTDPKNHGLSDEHVFEVICPSIPGYGFSEASSKKGFNSVATARIFYKLMLRLGFQEFYIQGGDWGSLICTNMAQLVPSHVKGLHLNMALVLSNFSTLTLLLGQRFGRFLGLTERDVELLYPVKEKVFYSLMRESGYMHIQCTKPDTVGSALNDSPVGLAAYILEKFSTWTNTEFRYLEDGGLERKFSLDDLLTNVMLYWTTGTIISSQRFYKENLGQGWMTQKHERMKVYVPTGFSAFPFELLHTPEKWVRFKYPKLISYSYMVRGGHFAAFEEPELLAQDIRKFLSVLERQ

SEQ ID NO: 794 - protein, 1065 aa, Homo sapiens
MKILILGIFLFLCSTPAWAKEKHYYIGIIETTWDYASDHGEKKLISVDTEHSNIYLQNGPDRIGRLYKKALYLQYTDETFRTTIEKPVWLGFLGPIIKAETGDKVYVHLKNLASRPYTFHSHGITYYKEHEGAIYPDNTTDFQRADDKVYPGEQYTYMLLATEEQSPGEGDGNCVTRIYHSHIDAPKDIASGLIGPLIICKKDSLDKEKEKHIDREFVVMFSVVDENFSWYLEDNIKTYCSEPEKVDKDNEDFQESNRMYSVNGYTFGSLPGLSMCAEDRVKWYLFGMGNEVDVHAAFFHGQALTNKNYRIDTINLFPATLFDAYMVAQNPGEWMLSCQNLNHLKAGLQAFFQVQECNKSSSKDNIRGKHVRHYYIAAEEIIWNYAPSGIDIFTKENLTAPGSDSAVFFEQGTTRIGGSYKKLVYREYTDASFTNRKERGPEEEHLGILGPVIWAEVGDTIRVTFHNKGAYPLSIEPIGVRFNKNNEGTYYSPNYNPQSRSVPPSASHVAPTETFTYEWTVPKEVGPTNADPVCLAKMYYSAVDPTKDIFTGLIGPMKICKKGSLHANGRQKDVDKEFYLFPTVFDENESLLLEDNIRMFTTAPDQVDKEDEDFQESNKMHSMNGFMYGNQPGLTMCKGDSVVWYLFSAGNEADVHGIYFSGNTYLWRGERRDTANLFPQTSLTLHMWPDTEGTFNVECLTTDHYTGGMKQKYTVNQCRRQSEDSTFYLGERTYYIAAVEVEWDYSPQREWEKELHHLQEQNVSNAFLDKGEFYIGSKYKKVVYRQYTDSTFRVPVERKAEEEHLGILGPQLHADVGDKVKIIFKNMATRPYSIHAHGVQTESSTVTPTLPGETLTYVWKIPERSGAGTEDSACIPWAYYSTVDQVKDLYSGLIGPLIVCRRPYLKVFNPRRKLEFALLFLVFDENESWYLDDNIKTYSDHPEKVNKDDEEFIESNKMHAINGRMFGNLQGLTMHVGDEVNWYLMGMGNEIDLHTVHFHGHSFQYKHRGVYSSDVFDIFPGTYQTLEMFPRTPGIWLLHCHVTDHIHAGMETTYTVLQNEDTKSG

SEQ ID NO: 795 - protein, 486 aa, Homo sapiens
MDENNGLLLLELNPPNPWDLQPRSPEELAFGEVQITYLTHACMDLKLGDKRMVFDPWLIGPAFARGWWLLHEPPSDWLERLCQADLIYISHLHSDHLSYPTLKKLAGRRPDIPIYVGNTERPVFWNLNQSGVQLTNINVVPFGIWQQVDKNLRFMILMDGVHPEMDTCIIVEYKGHKILNIVDCTRPNGGRLPMKVALMMSDFAGGASGFPMTFSGGKFTEEWKAQFIKTERKKLLNYKARLVKNLQPRIYCPFAGYFVESHPSDKYIKETNTKNDPNELNNLIKKNSDVITWTPRPGATLDLGRMLKDRTDSKGIIEPPEGTKIYKDSWDFEPYLEILNAALGDEIFLHSSWIKEYFTWAGFKDYNLVVRMIETDEDFNPFPGGYDYLVDFLDLSFPKERPQREHPYEEIHSRVDVIRHVVKNGLLWDELYIGFQTRLQRDPDIYHHLFWNHFQIKLPLTPPNWKSFLMCCEQNGPAILQECKTT

SEQ ID NO: 796 - protein, 698 aa, Homo sapiens
MQAHELFRYFRMPELVDFRQYVRTLPTNTLMGFGAFAALTTFWYATRPKPLKPPCDLSMQSVEVAGSGGARRSALLDSDEPLVYFYDDVTTLYEGFQRGIQVSNNGPCLGSRKPDQPYEWLSYKQVAELSECIGSALIQKGFKTAPDQFIGIFAQNRPEWVIIEQGCFAYSMVIVPLYDTLGNEAITYIVNKAELSLVFVDKPEKAKLLLEGVENKLIPGLKIIVVMDAYGSELVERGQRCGVEVTSMKAMEDLGRANRRKPKPPAPEDLAVICFTSGTTGNPKGAMVTHRNIVSDCSAFVKATENTVNPCPDDTLISFLPLAHMFERVVECVMLCHGAKIGFFQGDIRLLMDDLKVLQPTVFPVVPRLLNRMFDRIFGQANTTLKRWLLDFASKRKEAELRSGIIRNNSLWDRLIFHKVQSSLGGRVRLMVTGAAPVSATVLTFLRAALGCQFYEGYGQTECTAGCCLTMPGDWTAGHVGAPMPCNLIKLVDVEEMNYMAAEGEGEVCVKGPNVFQGYLKDPAKTAEALDKDGWLHTGDIGKWLPNGTLKIIDRKKHIFKLAQGEYIAPEKIENIYMRSEPVAQVFVHGESLQAFLIAIVVPDVETLCSWAQKRGFEGSFEELCRNKDVKKAILEDMVRLGKDSGLKPFEQVKGITLHPELFSIDNGLLTPTMKAKRPELRNYFRSQIDDLYSTIKV

SEQ ID NO: 797 - protein, 373 aa, Homo sapiens
MTTSASSHLNKGIKQVYMSLPQGEKVQAMYIWIDGTGEGLRCKTRTLDSEPKCVEELPEWNFDGSSTLQSEGSNSDMYLVPAAMFRDPFRKDPNKLVLCEVFKYNRRPAETNLRHTCKRIMDMVSNQHPWFGMEQEYTLMGTDGHPFGWPSNGFPGPQGPYYCGVGADRAYGRDIVEAHYRACLYAGVKIAGTNAEVMPAQWEFQIGPCEGISMGDHLWVARFILHRVCEDFGVIATFDPKPIPGNWNGAGCHTNFSTKAMREENGLKYIEEAIEKLSKRHQYHIRAYDPKGGLDNARRLTGFHETSNINDFSAGVANRSASIRIPRTVGQEKKGYFEDRRPSANCDPFSVTEALIRTCLLNETGDEPFQYKN

SEQ ID NO: 798 - protein, 532 aa, Homo sapiens
MGKKVAIIGAGVSGLASIRSCLEEGLEPTCFEKSNDIGGLWKFSDHAEEGRASIYKSVFSNSSKEMMCFPDFPFPDDFPNFMHNSKIQEYIIAFAKEKNLLKYIQFKTFVSSVNKHPDFATTGQWDVTTERDGKKESAVFDAVMVCSGHHVYPNLPKESFPGLNHFKGKCFHSRDYKEPGVFNGKRVLVVGLGNSGCDIATELSRTAEQVMISSRSGSWVMSRVWDNGYPWDMLLVTRFGTFLKNNLPTAISDWLYVKQMNARFKHENYGLMPLNGVLRKEPVFNDELPASILCGIVSVKPNVKEFTETSAIFEDGTIFEGIDCVIFATGYSFAYPFLDESIIKSRNNEIILFKGVFPPLLEKSTIAVIGFVQSLGAAIPTVDLQSRWAAQVIKGTCTLPSMEDMMNDINEKMEKKRKWFGKSETIQTDYIVYMDELSSFIGAKPNIPWLFLTDPKLAMEVYFGPCSPYQFRLVGPGQWPGARNAMLTQWDRSLKPMQTRVVGRLQKPCFFFHWLKLFAIPILLIAVFLVLT

SEQ ID NO: 799 - protein, 225 aa, Homo sapiens
MARLLQASCLLSLLLAGFVSQSRGQEKSKMDCHGGISGTIYEYGALTIDGEEYIPFKQYAGKYVLFVNVASYGLTGQYIELNALQEELAPFGLVILGFPCNQFGKQEPGENSEILPTLKYVRPGGGFVPNFQLFEKGDVNGEKEQKFYTFLKNSCPPTSELLGTSDRLFWEPMKVHDIRWNFEKFLVGPDGIPIMRWHHRTTVSNVKMDILSYMRRQAALGVKRK

SEQ ID NO: 800 - protein, 611 aa, Homo sapiens [sequence omitted]

SEQ ID NO: 801 - protein, 868 aa, Homo sapiens
KGPLRGYRSRWFVFDARRCYLYYFKSPQDALPLGHLDIADACFSYQGPDEAAEPGTEPPAHFQVHSAGAVTVLKAPNRQLMTYWLQELQQKRWEYCNSLDMVKWDSRTSPTPGDFPKGLVARDNTDLIYPHPNASAEKARNVLAVETVPGELVGEQAANQPAPGHPNSINFYSLKQWGNELKNSMSSFRPGRGHNDSRRTVFYTNEEWELLDPTPKDLEESIVQEEKKKLTPEGNKGVTGSGFPFDFGRNPYKGKRPLKDIIGSYKNRHSSGDPSSEGTSGSGSVSIRKPASEMQLQVQSQQEELEQLKKDLSSQKELVRLLQQTVRSSQYDKYFTSSRLCEGVPKDTLELLHQKDDQILGLTSQLERFSLEKESLQQEVRTLKSKVGELNEQLGMLMETIQAKDEVIIKLSEGEGNGPPPTVAPSSPSVVPVARDQLELDRLKDNLQGYKTQNKFLNKEILELSALRRNAERRERDLMAKYSSLEAKLCQIESKYLILLQEMKTPVCSEDQGPTREVIAQLLEDALQVESQEQPEQAFVKPHLVSEYDIYGFRTVPEDDEEEKLVAKVRALDLKTLYLTENQEVSTGVKWENYFASTVNREMMCSPELKNLIRAGIPHEHRSKVWKWCVDRHTRKFKDNTEPGHFQTLLQKALEKQNPASKQIELDLLRTLPNNKHYSCPTSEGIQKLRNVLLAFSWRNPDIGYCQGLNRLVAVALLYLEQEDAFWCLVTIVEVFMPRDYYTKTLLGSQVDQRVFRDLMSEKLPRLHGHFEQYKVDYTLITFNWFLVVFVDSVVSDILFKIWDSFLYEGPKVIFRFALALFKYKEEEILKLQDSMSIFKYLRYFTRTILDARSGTDAPTTWRKSGWS

SEQ ID NO: 802 - protein, 683 aa, Homo sapiens
MNTSIPYQQNPYNPRGSSNVIQCYRCGDTCKGEVVRVHNNHFHIRCFTCQVCGCGLAQSGFFFKNQEYICTQDYQQLYGTRCDSCRDFITGEVISALGRTYHPKCFVCSLCRKPFPIGDKVTFSGKECVCQTCSQSMASSKPIKIRGPSHCAGCKEEIKHGQSLLALDKQWHVSCFKCQTCSVILTGEYISKDGVPYCESDYHAQFGIKCETCDRYISGRVLEAGGKHYHPTCARCVRCHQMFTEGEEMYLTGSEVWHPICKQAARAEKKLKHRRTSETSISPPGSSIGSPNRVICAKVDNEILNYKDLAALPKVKSIYEVQRPDLISYEPHSRYMSDEMLERCGYGESLGTLSPYSQDIYENLDLRQRRASSPGYIDSPTYSRQGMSPTFSRSPHHYYRSGPESGRSSPYHSQLDVRSSTPTSYQAPKHFHIPAGDSNIYRKPPIYKRHGDLSTATKSKTSEDISQTSKYSPIYSPDPYYASESEYWTYHGSPKVPRARRFSSGGEEDDFDRSMHKLQSGIGRLILKEEMKARSSSYADPWTPPRSSTSSREALHTAGYEMSLNGSPRSHYLADSDPLISKSASLPAYRRNGLHRTPSADLFHYDSMNAVNWGMREYKIYPYELLLVTTRGRNRLPKDVDRTRLERHLSQEEFYQVFGMTISEFDRLALWKRNELKKQARLF

SEQ ID NO: 803 - protein, 265 aa, Homo sapiens
MNMSVLTLQEYEFEKQFNENEAIQWMQENWKKSFLFSALYAAFIFGGRHLMNKRAKFELRKPLVLWSLTLAVFSIFGALRTGAYMVYILMTKGLKQSVCDQGFYNGPVSKFWAYAFVLSKAPELGDTIFIILRKQKLIFLHWYHHITVLLYSWYSYKDMVAGGGWFMTMNYGVHAVMYSYYALRAAGFRVSRKFAMFITLSQITQMLMGCVVNYLVFCWMQHDQCHSHFQNIFWSSLMYLSYLVLFCHFFFEAYIGKMRKTTKAE

SEQ ID NO: 804 - protein, 984 aa, Homo sapiens
MERRWPLGLGLVLLLCAPLPPGARAKEVTLMDTSKAQGELGWLLDPPKDGWSEQQQILNGTPLYMYQDCPMQGRRDTDHWLRSNWIYRGEEASRVHVELQFTVRDCKSFPGGAGPLGCKETFNLLYMESDQDVGIQLRRPLFQKVTTVAADQSFTIRDLASGSVKLNVERCSLGRLTRRGLYLAFHNPGACVALVSVRVFYQRCPETLNGLAQFPDTLPGPAGLVEVAGTCLPHARASPRPSGAPRMHCSPDGEWLVPVGRCHCEPGYEEGGSGEACVACPSGSYRMDMDTPHCLTCPQQSTAESEGATICTCESGHYRAPGEGPQVACTGPPSAPRNLSFSASGTQLSLRWEPPADTGGRQDVRYSVRCSQCQGTAQDGGPCQPCGVGVHFSPGARALTTPAVHVNGLEPYANYTFNVEAQNGVSGLGSSGHASTSVSISMGHAESLSGLSLRLVKKEPRQLELTWAGSRPRSPGANLTYELHVLNQDEERYQMVLEPRVLLTELQPDTTYIVRVRMLTPLGPGPFSPDHEFRTSPPVSRGLTGGEIVAVIFGLLLGAALLLGILVFRSRRAQRQRQQRHVTAPPMWIERTSCAEALCGTSRHTRTLHREPWTLPGGWSNFPSRELDPAWLMVDTVIGEGEFGEVYRGTLRLPSQDCKTVAIKTLKDTSPGGQWWNFLREATIMGQFSHPHILHLEGVVTKRKPIMIITEFMENAALDAFLREREDQLVPGQLVAMLQGIASGMNYLSNHNYVHRDLAARNILVNQNLCCKVSDFGLTRLLDDFDGTYETQGGKIPIRWTAPEAIAHRIFTTASDVWSFGIVMWEVLSFGDKPYGEMSNQEVMKSIEDGYRLPPPVDCPAPLYELMKNCWAYDRARRPHFQKLQAHLEQLLANPHSLRTIANFDPRVTLRLPSLSGSDGIPYRTVSEWLESIRMKRYILHFHSAGLDTMECVLELTAEDLTQMGITLPGHQKRILCSIQGFKD

SEQ ID NO: 805 - protein, 1009 aa, Homo sapiens [sequence omitted]

SEQ ID NO: 806 - protein, 451 aa, Homo sapiens
MHGYFGCNAAAEPGYSAFVGTPQICVTKMSTRNCQGMDSVIKPLDTIPEDKKVRVQRTQSTFDPFEKPANQVKRVHSENNACINFKTSSTGKESPKVRRHSSPSSPTSPKFGKADSYEKLEKLGEGSYATVYKGKSKVNGKLVALKVIRLQEEEGTPFTAIREASLLKGLKHANIVLLHDIIHTKETLTLVFEYVHTDLCQYMDKHPGGLHPDNVKLFLFQLLRGLSYIHQRYILHRDLKPQNLLISDTGELKLADFGLARAKSVPSHTYSNEVVTLWYRPPDVLLGSTEYSTCLDMWGVGCIFVEMIQGVAAFPGMKDIQDQLERIFLVLGTPNEDTWPGVHSLPHFKPERFTLYSSKNLRQAWNKLSYVNHAEDLASKLLQCSPKNRLSAQAALSHEYFSDLPPRLWELTDMSSIFTVPNVRLQPEAGESMRAFGKNNSYGKSLSNSKH

SEQ ID NO: 807 - protein, 547 aa, Homo sapiens
MAEPSGSPVHVQLPQQAAPVTAAAAAAPAAATAAPAPAAPAAPAPAPAPAPAAQAVGWPICRDAYELQEVIGSGATAVVQAALCKPRQERVAIKRINLEKCQTSMDELLKEIQAMSQCSHPNVVTYYTSFVVKDELWLVMKLLSGGSMLDIIKYIVNRGEHKNGVLEEAIIATILKEVLEGLDYLHRNGQIHRDLKAGNILLGEDGSVQIADFGVSAFLATGGDVTRNKVRKTFVGTPCWMAPEVMEQVRGYDFKADMWSFGITAIELATGAAPYHKYPPMKVLMLTLQNDPPTLETGVEDKEMMKKYGKSFRKLLSLCLQKDPSKRPTAAELLKCKFFQKAKNREYLIEKLLTRTPDIAQRAKKVRRVPGSSGHLHKTEDGDWEWSDDEMDEKSEEGKAAFSQEKSRRVKEENPEIAVSASTIPEQIQSLSVHDSQGPPNANEDYREASSCAVNLVLRLRNSRKELNDIRFEFTPGRDTADGVSQELFSAGLVDGHDVVIVAANLQKIVDDPKALKTLTFKLASGCDGSEIPDEVKLIGFAQLSVS

SEQ ID NO: 808 - protein, 255 aa, Homo sapiens
MAELRVLVAVKRVIDYAVKIRVKPDRTGVVTDGVKHSMNPFCEIAVEEAVRLKEKKLVKEVIAVSCGPAQCQETIRTALAMGADRGIHVEVPPAEAERLGPLQVARVLAKLAEKEKVDLVLLGKQAIDDDCNQTGQMTAGFLDWPQGTFASQVTLEGDKLKVEREIDGGLETLRLKLPAVVTADLRLNEPRYATLPNIMKAKKKKIEVIKPGDLGVDLTSKLSVISVEDPPQRTAGVKVETTEDLVAKLKEIGRI

SEQ ID NO: 809 - protein, 540 aa, Homo sapiens
MGTTARAALVLTYLAVASAASEGGFTATGQRQLRPEHFQEVGYAAPPSPPLSRSLPMDHPDSSQHGPPFEGQSQVQPPPSQEATPLQQEKLLPAQLPAEKEVGPPLPQEAVPLQKELPSLQHPNEQKEGTPAPFGDQSHPEPESWNAAQHCQQDRSQGGWGHRLDGFPPGRPSPDNLNQICLPNRQHVVYGPWNLPQSSYSHLTRQGETLNFLEIGYSRCCHCRSHTNRLECAKLVWEEAMSRFCEAEFSVKTRPHWCCTRQGEARFSCFQEEAPQPHYQLRACPSHQPDISSGLELPFPPGVPTLDNIKNICHLRRFRSVPRNLPATDPLQRELLALIQLEREFQRCCRQGNNHTCTWKAWEDTLDKYCDREYAVKTHHHLCCRHPPSPTRDECFARRAPYPNYDRDILTIDISRVTPNLMGHLCGNQRVLTKHKHIPGLIHNMTARCCDLPFPEQACCAEEEKLTFINDLCGPRRNIWRDPALCCYLSPGDEQVNCFNINYLRNVALVSGDTENAKGQGEQGSTGGTNISSTSEPKEE

SEQ ID NO: 810 - protein, 415 aa, Homo sapiens
MGTTARAALVLTYLAVASAASEGGFTATGQRQLRPEHFQEVGYAAPPSPPLSRSLPMDHPDSSQHGPPFEGQSQVQPPPSQEATPLQQEKLLPAQLPAEKEVGPPLPQEAVPLQKELPSLQHPNEQKEGTPAPFGDQSHPEPESWNAAQHCQQDRSQGGWGHRLDGFPPGRPSPDNLNQICLPNRQHVVYGPWNLPQSSYSHLTRQGETLNFLEIGYSRCCHCRSHTNRLECAKLVWEDTLDKYCDREYAVKTHHHLCCRHPPSPTRDECFARRAPYPNYDRDILTIDISRVTPNLMGHLCGNQRVLTKHKHIPGLIHNMTARCCDLPFPEQACCAEEEKLTFINDLCGPRRNIWRDPALCCYLSPGDEQVNCFNINYLRNVALVSGDTENAKGQGEQGSTGGTNISSTSEPKEE

SEQ ID NO: 811 - protein, 228 aa, Homo sapiens
MQPRRQRLPAPWSGPRGPRPTAPLLALLLLLAPVAAPAGSGGPDDPGQPQDAGVPRRLLQQKARAALHFFNFRSGSPSALRVLAEVQEGRAWINPKEGCKVHVVFSTERYNPESLLQEGEGRLGKCSARVFFKNQKPRPTINVTCTRLIEKKKRQQEDYLLYKQMKQLKNPLEIVSIPDNHGHIDPSLRLIWDLAFLGSSYVMWEMTTQVSHYYLAQLTSVRQWVRKT

SEQ ID NO: 812 - protein, 153 aa, Homo sapiens
MASPDPPATSYAPSDVPSGVALFLTIPFAFFLPELIFGFLVWTMVAATHIVYPLLQGWVMYVSLTSFLISLMFLLSYLFGFYKRFESWRVLDSLYHGTTGILYMSAAVLQVHATIVSEKLLDPRIYYINSAASFFAFIATLLYILHAFSIYYH

SEQ ID NO: 813 - protein, 123 aa, Homo sapiens
MKAVLLALLMAGLALQPGTALLCYSCKAQVSNEDCLQVENCTQLGEQCWTARIRAVGLLTVISKGCSLNCVDDSQDYYVGKKNITCCDTDLCNASGAHALQPAAAILALLPALGLLLWGPGQL

SEQ ID NO: 814 - protein, 506 aa, Homo sapiens
MLSKVLPVLLGILLILQSRVEGPQTESKNEASSRDVVYGPQPQPLENQLLSEETKSTETETGSRVGKLPEASRILNTILSNYDHKLRPGIGEKPTVVTVEIAVNSLGPLSILDMEYTIDIIFSQTWYDERLCYNDTFESLVLNGNVVSQLWIPDTFFRNSKRTHEHEITMPNQMVRIYKDGKVLYTIRMTIDAGCSLHMLRFPMDSHSCPLSFSSFSYPENEMIYKWENFKLEINEKNSWKLFQFDFTGVSNKTEIITTPVGDFMVMTIFFNVSRRFGYVAFQNYVPSSVTTMLSWVSFWIKTESAPARTSLGITSVLTMTTLGTFSRKNFPRVSYITALDFYIAICFVFCFCALLEFAVLNFLIYNQTKAHASPKLRHPRINSRAHARTRARSRACARQHQEAFVCQIVTTEGSDGEERPSCSAQQPPSPGSPEGPRSLCSKLACCEWCKRFKKYFCMVPDCEGSTWQQGRLCIHVYRLDNYSRVVFPVTFFFFNVLYWLVCLNL

SEQ ID NO: 815 - protein, 393 aa, Homo sapiens
MEYTIDIIFSQTWYDERLCYNDTFESLVLNGNVVSQLWIPDTFFRNSKRTHEHEITMPNQMVRIYKDGKVLYTIRMTIDAGCSLHMLRFPMDSHSCPLSFSSFSYPENEMIYKWENFKLEINEKNSWKLFQLDFTGVSNKTEIITTPVGDFMVMTIFFNVSRRFGYVAFQNYVPSSVTTMLSWVSFWIKTESAPARTSLGITSVLTMTTLGTFSRKNFPRVSYITALDFYIAICFVFCFCALLEFAVLNFLIYNQTKAHASPKLRHPRINSRAHARTRARSRACARQHQEAFVCQIVTTEGSDGEERPSCSAQQPPSPGSPEGPRSLCSKLACCEWCKRFKKYFCMVPDCEGSTWQQARLCIHVYRLDNYSRVVFPVTFFFFNVLYWLVCLNL

SEQ ID NO: 816 - protein, 361 aa, Homo sapiens
MEYTIDIIFSQTWNSKRTHEHEITMPNQMVRIYKDGKVLYTIRMTIDAGCSLHMLRFPMDSHSCPLSFSSFSYPENEMIYKWENFKLEINEKNSWKLFQFDFTGVSNKTEIITTPVGDFMVMTIFFNVSRRFGYVAFQNYVPSSVTTMLSWVSFWIKTESAPARTSLGITSVLTMTTLGTFSRKNFPRVSYITALDFYIAICFVFCFCALLEFAVLNFLIYNQTKAHASPKLRHPRINSRAHARTRARSRACARQHQEAFVCQIVTTEGSDGEERPSCSAQQPPSPGSPEGPRSLCSKLACCEWCKRFKKYFCMVPDCEGSTWQQGRLCIHVYRLDNYSRVVFPVTFFFFNVLYWLVCLNL

SEQ ID NO: 817 - protein, 393 aa, Homo sapiens
MEYTIDIIFSQTWYDERLCYNDTFESLVLNGNVVSQLWIPDTFFRNSKRTHEHEITMPNQMVRIYKDGKVLYTIRMTIDAGCSLHMLRFPMDSHSCPLSFSSFSYPENEMIYKWENFKLEINEKNSWKLFQFDFTGVSNKTEIITTPVGDFMVMTIFFNVSRRFGYVAFQNYVPSSVTTMLSWVSFWIKTESAPARTSLGITSVLTMTTLGTFSRKNFPRVSYITALDFYIAICFVFCFCALLEFAVLNFLIYNQTKAHASPKLRHPRINSRAHARTRARSRACARQHQEAFVCQIVTTEGSDGEERPSCSAQQPPSPGSPEGPRSLCSKLACCEWCKRFKKYFCMVPDCEGSTWQQGRLCIHVYRLDNYSRVVFPVTFFFFNVLYWLVCLNL

SEQ ID NO: 818 - protein, 362 aa, Homo sapiens
MDLHLFDYSEPGNFSDISWPCNSSDCIVVDTVMCPNMPNKSVLLYTLSFIYIFIFVIGMIANSVVVWVNIQAKTTGYDTHCYILNLAIADLWVVLTIPVWVVSLVQHNQWPMGELTCKVTHLIFSINLFGSIFFLTCMSVDRYLSITYFTNTPSSRKKMVRRVVCILVWLLAFCVSLPDTYYLKTVTSASNNETYCRSFYPEHSIKEWLIGMELVSVVLGFAVPFSIIAVFYFLLARAISASSDQEKHSSRKIIFSYVVVFLVCWLPYHVAVLLDIFSILHYIPFTCRLEHALFTALHVTQCLSLVHCCVNPVLYSFINRNYRYELMKAFIFKYSAKTGLTKLIDASRVSETEYSALEQSTK

SEQ ID NO: 819 - protein, 252 aa, Homo sapiens
MRAPLLPPAPVVLSLLILGSGHYAAGLDLNDTYSGKREPFSGDHSADGFEVTSRSEMSSGSEISPVSEMPSSSEPSSGADYDYSEEYDNEPQIPGYIVDDSVRVEQVVKPPQNKTESENTSDKPKRKKKGGKNGKNRRNRKKKNPCNAEFQNFCIHGECKYIEHLEAVTCKCQQEYFGERCGEKSMKTHSMIDSSLSKIALAAIAAFMSAVILTAVAVITVQLRRQYVRKYEGEAEERKKLRQENGNVHAIA

SEQ ID NO: 820 - protein, 897 aa, Homo sapiens
MEQLADVTLRRLLDNEVFDLDPDLQEPSQITKRDLEARAQNEFFRAFFRLPRKEKLHAVVDCSLWTPFSRCHTAGRMFASDSYICFASREDGCCKIILPLREVVSIEKMEDTSLLPHPIIVSIRSKVAFQFIELRDRDSLVEALLARLKQVHANHPVHYDTSADDDMASLVFHSTSMCSDHRFGDLEMMSSQNSEESEKEKSPLMHPDALVTAFQQSGSQSPDSRMSREQIKISLWNDHFVEYGRTVCMFRTEKIRKLVAMGIPESLRGRLWLLFSDAVTDLASHPGYYGNLVEESLGKCCLVTEEIERDLHRSLPEHPAFQNETGIAALRRVLTAYAHRNPKIGYCQSMNILTSVLLLYTKEEEAFWLLVAVCERMLPDYFNHRVIGAQVDQSVFEELIKGHLPELAEHMNDLSALASVSLSWFLTLFLSIMPLESAVNVVDCFFYDGIKAIFQLGLAVLEANAEDLCSSKDDGQALMILSRFLDHIKNEDSPGPPVGSHHAFFSDDQEPYPVTDISDLIRDSYEKFGDQSVEQIEHLRYKHRIRVLQGHEDTTKQNVLRVVIPEVSILPEDLEELYDLFKREHMMSCYWEQPRPMASRHDPSRPYAEQYRIDARQFAHLFQLVSPWTCGAHTEILAERTFRLLDDNMDQLIEFKAFVSCLDIMYNGEMNEKIKLLYRLHIPPALTENDRDSQSPLRNPLLSTSRPLVFGKPNGDAVDYQKQLKQMIKDLAKEKDKTEKELPKMSQREFIQFCKTLYSMFHEDPEENDLYQAIATVTTLLLQIGEVGQRGSSSGSCSQECGEELRASAPSPEDSVFADTGKTPQDSQALPEAAERDWTVSLEHILASLLTEQSLVNFFEKPLDMKSKLENAKINQYNLKTFEMSHQSQSELKLSNL

SEQ ID NO: 821 - protein, 560 aa, Homo sapiens
MECLYYFLGFLLLAARLPLDAAKRFHDVLGNERPSAYMREHNQLNGWSSDENDWNEKLYPVWKRGDMRWKNSWKGGRVQAVLTSDSPALVGSNITFAVNLIFPRCQKEDANGNIVYEKNCRNEAGLSADPYVYNWTAWSEDSDGENGTGQSHHNVFPDGKPFPHHPGWRRWNFIYVFHTLGQYFQKLGRCSVRVSVNTANVTLGPQLMEVTVYRRHGRAYVPIAQVKDVYVVTDQIPVFVTMFQKNDRNSSDETFLKDLPIMFDVLIHDPSHFLNYSTINYKWSFGDNTGLFVSTNHTVNHTYVLNGTFSLNLTVKAAAPGPCPPPPPPPRPSKPTPSLGPAGDNPLELSRIPDENCQINRYGHFQATITIVEGILEVNIIQMTDVLMPVPWPESSLIDFVVTCQGSIPTEVCTIISDPTCEITQNTVCSPVDVDEMCLLTVRRTFNGSGTYCVNLTLGDDTSLALTSTLISVPDRDPASPLRMANSALISVGCLAIFVTVISLLVYKKHKEYNPIENSPGNVVRSKGLSVFLNRAKAVFFPGNQEKDPLLKNQEFKGVS

SEQ ID NO: 822 - protein, 2321 aa, Homo sapiens
MGPGARGRRRRRRPMSPPPPPPPVRALPLLLLLAGPGAAAPPCLDGSPCANGGRCTQLPSREAACLCPPGWVGERCQLEDPCHSGPCAGRGVCQSSVVAGTARFSCRCPRGFRGPDCSLPDPCLSSPCAHGARCSVGPDGRFLCSCPPGYQGRSCRSDVDECRVGEPCRHGGTCLNTPGSFRCQCPAGYTGPLCENPAVPCAPSPCRNGGTCRQSGDLTYDCACLPGFEGQNCEVNVDDCPGHRCLNGGTCVDGVNTYNCQCPPEWTGQFCTEDVDECQLQPNACHNGGTCFNTLGGHSCVCVNGWTGESCSQNIDDCATAVCFHGATCHDRVASFYCACPMGKTGLLCHLDDACVSNPCHEDAICDTNPVNGRAICTCPPGFTGGACDQDVDECSIGANPCEHLGRCVNTQGSFLCQCGRGYTGPRCETDVNECLSGPCRNQATCLDRIGQFTCICMAGFTGTYCEVDIDECQSSPCVNGGVCKDRVNGFSCTCPSGFSGSTCQLDVDECASTPCRNGAKCVDQPDGYECRCAEGFEGTLCDRNVDDCSPDPCHHGRCVDGIASFSCACAPGYTGTRCESQVDECRSQPCRHGGKCLDLVDKYLCRCPSGTTGVNCEVNIDDCASNPCTFGVCRDGINRYDCVCQPGFTGPLCNVEINECASSPCGEGGSCVDGENGFRCLCPPGSLPPLCLPPSHPCAHEPCSHGICYDAPGGFRCVCEPGWSGPRCSQSLARDACESQPCRAGGTCSSDGMGFHCTCPPGVQGRQCELLSPCTPNPCEHGGRCESAPGQLPVCSCPQGWQGPRCQQDVDECAGPAPCGPHGICTNLAGSFSCTCHGGYTGPSCDQDINDCDPNPCLNGGSCQDGVGSFSCSCLPGFAGPRCARDVDECLSNPCGPGTCTDHVASFTCTCPPGYGGFHCEQDLPDCSPSSCFNGGTCVDGVNSFSCLCRPGYTGAHCQHEADPCLSRPCLHGGVCSAAHPGFRCTCLESFTGPQCQTLVDWCSRQPCQNGGRCVQTGAYCLCPPGWSGRLCDIRSLPCREAAAQIGVRLEQLCQAGGQCVDEDSSHYCVCPEGRTGSHCEQEVDPCLAQPCQHGGTCRGYMGGYMCECLPGYNGDNCEDDVDECASQPCQHGGSCIDLVARYLCSCPPGTLGVLCEINEDDCGPGPPLDSGPRCLHNGTCVDLVGGFRCTCPPGYTGLRCEADINECRSGACHAAHTRDCLQDPGGGFRCLCHAGFSGPRCQTVLSPCESQPCQHGGQCRPSPGPGGGLTFTCHCAQPFWGPRCERVARSCRELQCPVGVPCQQTPRGPRCACPPGLSGPSCRSFPGSPPGASNASCAAAPCLHGGSCRPAPLAPFFRCACAQGWTGPRCEAPAAAPEVSEEPRCPRAACQAKRGDQRCDRECNSPGCGWDGGDCSLSVGDPWRQCEALQCWRLFNNSRCDPACSSPACLYDNFDCHAGGRERTCNPVYEKYCADHFADGRCDQGCNTEECGWDGLDCASEVPALLARGVLVLTVLLPPEELLRSSADFLQRLSAILRTSLRFRLDAHGQAMVFPYHRPSPGSEPRARRELAPEVIGSVVMLEIDNRLCLQSPENDHCFPDAQSAADYLGALSAVERLDFPYPLRDVRGEPLEPPEPSVPLLPLLVAGAVLLLVILVLGVMVARRKREHSTLWFPEGFSLHKDVASGHKGRREPVGQDALGMKNMAKGESLMGEVATDWMDTECPEAKRLKVEEPGMGAEEAVDCRQWTQHHLVAADIRVAPAMALTPPQGDADADGMDVNVRGPDGFTPLMLASFCGGALEPMPTEEDEADDTSASIISDLICQGAQLGARTDRTGETALHLAARYARADAAKRLLDAGADTNAQDHSGRTPLHTAVTADAQGVFQILIRNRSTDLDARMADGSTALILAARLAVEGMVEELIASHADVNAVDELGKSALHWAAAVNNVEATLALLKNGANKDMQDSKEETPLFLAAREGSYEAAKLLLDHFANREITDHLDRLPRDVAQERLHQDIVRLLDQPSGPRSPPGPHGLGPLLCPPGAFLPGLKAAQSGSKKSRRPPGKAGLGPQGPRGRGKKLTLACPGPLADSSVTLSPVDSLDSPRPFGGPPASPGGFPLEGPYAAATATAVSLAQLGGPGRAGLGRQPPGGCVLSLGLLNPVAVPLDWARLPPPAPPGPSFLLPLAPGPQLLNPGTPVSPQERPPPYLAVPGHGEEYPVAGAHSSPPKARFLRVPSEHPYLTPSPESPEHWASPSPPSLSDWSESTPSPATATGAMATTTGALPAQPLPLSVPSSLAQAQTQLGPQPEVTPKRQVLA

SEQ ID NO: 823 - protein, 391 aa, Homo sapiens
MFSPWKISMFLSVREDSVPTTASFSADMLNVTLQGPTLNGTFAQSKCPQVEWLGWLNTIQPPFLWVLFVLATLENIFVLSVFCLHKSSCTVAEIYLGNLAAADLILACGLPFWAITISNNFDWLFGETLCRVVNAIISMNLYSSICFLMLVSIDRYLALVKTMSMGRMRGVRWAKLYSLVIWGCTLLLSSPMLVFRTMKEYSDEGHNVTACVISYPSLIWEVFTNMLLNVVGFLLPLSVITFCTMQIMQVLRNNEMQKFKEIQTERRATVLVLVVLLLFIICWLPFQISTFLDTLHRLGILSSCQDERIIDVITQIASFMAYSNSCLNPLVYVIVGKRFRKKSWEVYQGVCQKGGCRSEPIQMENSMGTLRTSISVERQIHKLQDWAGSRQ

SEQ ID NO: 824 - protein, 268 aa, Homo sapiens
MSGKHYKGPEVSCCIKYFIFGFNVIFWFLGITFLGIGLWAWNEKGVLSNISSITDLGGFDPVWLFLVVGGVMFILGFAGCIGALRENTFLLKFFSVFLGIIFFLELTAGVLAFVFKDWIKDQLYFFINNNIRAYRDDIDLQNLIDFTQEYWQCCGAFGADDWNLNIYFNCTDSNASRERCGVPFSCCTKDPAEDVINTQCGYDARQKPEVDQQIVIYTKGCVPQFEKWLQDNLTIVAGIFIGIALLQIFGICLAQNLVSDIEAVRASW

SEQ ID NO: 825 - protein, 324 aa, Homo sapiens
MFCGDYVQGTIFPAPNFNPIMDAQMLGGALQGFDCDKDMLINILTQRCNAQRMMIAEAYQSMYGRDLIGDLREQLSDHFKDVMAGLMYPPPLYDAHELWHAMKGVGTDENCLIEILASRTNGEIFQMREAYCLQYSNNLQEDIYSETSGHFRDTLMNLVQGTREEGYSDPAMAAQDAMVLWEACQQKTGGHKTMLQMILCNKSYQQLRLVFQEFQNISGQDMVDAINECYDGYFQELLVAIVLCVRDKPAYFAYRLYSAIHDFGFHNKTVIRILIARSEIDLLTIRKRYKERYGKSLFHDIRNFASGHYKKALLAICAGDAEDY

SEQ ID NO: 826 - protein, 64 aa, Homo sapiens
MRVLYLLFSFLFIFLMPLPGVFGGIGDPVTCLKSGAICHPVFCPRRYKQIGTCGLPGTKCCKKP

SEQ ID NO: 827 - protein, 288 aa, Homo sapiens
MKPSGEDQAALAAGPWEECFQAAVQLALRAGQIIRKALTEEKRVSTKTSAADLVTETDHLVEDLIISELRERFPSHRFIAEEAAASGAKCVLTHSPTWIIDPIDGTCNFVHRFPTVAVSIGFAVRQELEFGVIYHCTEERLYTGRRGRGAFCNGQRLRVSGETDLSKALVLTEIGPKRDPATLKLFLSNMERLLHAKAHGVRVIGSSTLALCHLASGAADAYYQFGLHCWDLAAATVIIREAGGIVIDTSGGPLDLMACRVVAASTREMAMLIAQALQTINYGRDDEK

SEQ ID NO: 828 - protein, 323 aa, Homo sapiens
MDSKQQCVKLNDGHFMPVLGFGTYAPPEVPRSKALEVTKLAIEAGFRHIDSAHLYNNEEQVGLAIRSKIADGSVKREDIFYTSKLWSTFHRPELVRPALENSLKKAQLDYVDLYLIHSPMSLKPGEELSPTDENGKVIFDIVDLCTTWEAMEKCKDAGLAKSIGVSNFNRRQLEMILNKPGLKYKPVCNQVECHPYFNRSKLLDFCKSKDIVLVAYSALGSQRDKRWVDPNSPVLLEDPVLCALAKKHKRTPALIALRYQLQRGVVVLAKSYNEQRIRQNVQVFEFQLTAEDMKAIDGLDRNLHYFNSDSFASHPNYPYSDEY

SEQ ID NO: 829 - protein, 316 aa, Homo sapiens
MATFVELSTKAKMPIVGLGTWKSPLGKVKEAVKVAIDAGYRHIDCAYVYQNEHEVGEAIQEKIQEKAVKREDLFIVSKLWPTFFERPLVRKAFEKTLKDLKLSYLDVYLIHWPQGFKSGDDLFPKDDKGNAIGGKATFLDAWEAMEELVDEGLVKALGVSNFSHFQIEKLLNKPGLKYKPVTNQVECHPYLTQEKLIQYCHSKGITVTAYSPLGSPDRPWAKPEDPSLLEDPKIKEIAAKHKKTAAQVLIRFHIQRNVIVIPKSVTPARIVENIQVFDFKLSDEEMATILSFNRNWRACNVLQSSHLEDYPFDAEY

SEQ ID NO: 830 - protein, 135 aa, Homo sapiens
MATVQQLEGRWRLVDSKGFDEYMKELGVGIALRKMGAMAKPDCIITCDGKNLTIKTESTLKTTQFSCTLGEKFEETTADGRKTQTVCNFTDGALVQHQEWDGKESTITRKLKDGKLVVECVMNNVTCTRIYEKVE

SEQ ID NO: 831 - protein, 258 aa, Homo sapiens [sequence omitted]

SEQ ID NO: 832 - protein, 476 aa, Homo sapiens
MMHLAFLVLLCLPVCSAYPLSGAAKEEDSNKDLAQQYLEKYYNLEKDVKQFRRKDSNLIVKKIQGMQKFLGLEVTGKLDTDTLEVMRKPRCGVPDVGHFSSFPGMPKWRKTHLTYRIVNYTPDLPRDAVDSAIEKALKVWEEVTPLTFSRLYEGEADIMISFAVKEHGDFYSFDGPGHSLAHAYPPGPGLYGDIHFDDDEKWTEDASGTNLFLVAAHELGHSLGLFHSANTEALMYPLYNSFTELAQFRLSQDDVNGIQSLYGPPPASTEEPLVPTKSVPSGSEMPAKCDPALSFDAISTLRGEYLFFKDRYFWRRSHWNPEPEFHLISAFWPSLPSYLDAAYEVNSRDTVFIFKGNEFWAIRGNEVQAGYPRGIHTLGFPPTIRKIDAAVSDKEKKKTYFFAADKYWRFDENSQSMEQGFPRLIADDFPGVEPKVDAVLQAFGFFYFFSGSSQFEFDPNARMVTHILKSNSWLHC

SEQ ID NO: 833 - protein, 707 aa, Homo sapiens
MSLWQPLVLVLLVLGCCFAAPRQRQSTLVLFPGDLRTNLTDRQLAEEYLYRYGYTRVAEMRGESKSLGPALLLLQKQLSLPETGELDSATLKAMRTPRCGVPDLGRFQTFEGDLKWHHHNITYWIQNYSEDLPRAVIDDAFARAFALWSAVTPLTFTRVYSRDADIVIQFGVAEHGDGYPFDGKDGLLAHAFPPGPGIQGDAHFDDDELWSLGKGVVVPTRFGNADGAACHFPFIFEGRSYSACTTDGRSDGLPWCSTTANYDTDDRFGFCPSERLYTRDGNADGKPCQFPFIFQGQSYSACTTDGRSDGYRWCATTANYDRDKLFGFCPTRADSTVMGGNSAGELCVFPFTFLGKEYSTCTSEGRGDGRLWCATTSNFDSDKKWGFCPDQGYSLFLVAAHEFGHALGLDHSSVPEALMYPMYRFTEGPPLHKDDVNGIRHLYGPRPEPEPRPPTTTTPQPTAPPTVCPTGPPTVHPSERPTAGPTGPPSAGPTGPPTAGPSTATTVPLSPVDDACNVNIFDAIAEIGNQLYLFKDGKYWRFSEGRGSRPQGPFLIADKWPALPRKLDSVFEEPLSKKLFFFSGRQVWVYTGASVLGPRRLDKLGLGADVAQVTGALRSGRGKMLLFSGRRLWRFDVKAQMVDPRSASEVDRMFPGVPLDTHDVFQYREKAYFCQDRFYWRVSSRSELNQVDQVGYVTYDILQCPED

SEQ ID NO: 834 - protein, 380 aa, Homo sapiens
MMFSGFNADYEASSSRCSSASPAGDSLSYYHSPADSFSSMGSPVNAQDFCTDLAVSSANFIPTVTAISTSPDLQWLVQPALVSSVAPSQTRAPHPFGVPAPSAGAYSRAGVVKTMTGGRAQSIGRRGKVEQLSPEEEEKRRIRRERNKMAAAKCRNRRRELTDTLQAETDQLEDEKSALQTEIANLLKEKEKLEFILAAHRPACKIPDDLGFPEEMSVASLDLTGGLPEVATPESEEAFTLPLLNDPEPKPSVEPVKSISSMELKTEPFDDFLFPASSRPSGSETARSVPDMDLSGSFYAADWEPLHSGSLGMGPMATELEPLCTPVVTCTPSCTAYTSSFVFTYPEADSFPSCAAAHRKGSSSNEPSSDSLSSPTLLAL

SEQ ID NO: 835 - protein, 394 aa, Homo sapiens
MSREMQDVDLAEVKPLVEKGETITGLLQEFDVQEQDIETLHGSVHVTLCGTPKGNRPVILTYHDIGMNHKTCYNPLFNYEDMQEITQHFAVCHVDAPGQQDGAASFPAGYMYPSMDQLAEMLPGVLQQFGLKSIIGMGTGAGAYTLTRFALNNPEMVEGLVLINVNPCAEGWMDWAASKISGWTQALPDMVVSHLFGKEEMQSNVEVVHTYRQHIVNDMNPGNLHLFINAYNSRRDLEIERPMPGTHTVTLQCPALLVVGDSSPAVDAVVECNSKLDPTKTTLLKMADCGGLPQISQPAKLAEAFKYFVQGMGYMPSASMTRLMRSRTASGSSVTSLDGTRSRSHTSEGTRSRSHTSEGTRSRSHTSEGAHLDITPNSGAAGNSAGPKSMEVSC

SEQ ID NO: 836 - protein, 1319 aa, Homo sapiens
MFGLDQFEPQVNSRNAGQGERNFNETGLSMNTHFKAPAFHTGGPPGPVDPAMSALGQPPILGMNMEPYGFHARGHSELHAGGLQAQPVHGFFGGQQPHHGHPGSHHPHQHHPHFGGNFGGPDPGASCLHGGRLLGYGGAAGGLGSQPPFAEGYEHMAESQGPESFGPQRPGNLPDFHSSGASSHRVPAPCLPLDQSPNRAASFHGLPSSSGSDSHSLEPRRVTNQGAVDSLEYNYRARRPRDILTCFRPLTPKGSCLIMQRVARFLGGGFPGAPSAMPRAAGMVGLSKMHAQPPQQQPQQQQQPQQQQQHGVFFERFSGARKMPVGLEPSVGSRHPLMQPPQQAPPPPQQQPPQQPPQQQPPPPPGLLVRQNSLPACAPSAPAGRGGHAQRRPAGRRPHAAQPARAIRVSHPPAGEPEHAPLFRACFQHAASSSAAGAQPAAAAFRRAPLHERGQEARFDFPGSAGVDRCASWNGSMHNGALDNHLSPSAYPGLPGEFTPPVPDSFPSGPPLQHPAPDHQSLQQQQQQQQQQQQQQQQQQQQQQQQQQQQRQNAALMIKQMASRNQQQRLRQPNLAQLGHPGDVGQGGLVHGGPVGGLAQPNFEREGGSTGAGRLGTFEQQAPHLAQESAWFSGPHPPPGDLLPRRMGGSGLPADCGPHDPSLAPPPPPGGSGVLFRGPLQEPMRMPGEATCRAAFTGLQFGGSLGGLGQLQSPGAGVGLPSAASERRPPPPDFATSALGGQPGFPFGAAGRQSTPHSGPGVNSPPSAGGGGGSSGGGGGGGAYPPQPDFQPSQRTSASKLGALSLGSFNKPSSKDNLFGQSCLAALSTACQNMIASLGAPNLNVTFNKKNPPEGKRKLSQNETDGAAVAGNPGSDYFPGGTAPGGPRTRRPSGTSSSGSKASGPPNPPAQGDGTSLSPNYTLESTSGNDGKPVSGGGGRGRGRRKRDSGHVSPGTFFDKYSAAPDSGGAPGVSPGQQQASGAAVGGSSAGETRGAPTPHEKALTSPSWGKGAELLLGDQPDLIGSLDGGAKSDSSSPNVGEFASDEVSTSYANEDEVSSSSDNPQALVKASRSPLVTGSPKLPPRGVGAGEHGPKAPPPALGLGIMSNSTSTPDSYGGGGGPGHPGTPGLEQVRTPTSSSGAPPPDEIHPLEILQAQIQLQRQQFSISEDQPLGLKGGKKGECAVGASGAQNGDSELGSCCSEAVKSAMSTIDLDSLMAEHSAAWYMPADKALVDSADDDKTLAPWEKAKPQNPNSKEAHDLPANKASASQPGSHLQCLSVHCTDDVGDAKARASVPTWRSLHSDISNRFGTFVAALT

SEQ ID NO: 837 - protein, 584 aa, Homo sapiens
MGNQMSVPQRVEDQENEPEAETYQDNASALNGVPVVVSTHTVQHLEEVDLGISVKTDNVATSSPETTEISAVADANGKNLGKEAKPEAPAAKSRFFLMLSRPVPGRTGDQAADSSLGSVKLDVSSNKAPANKDPSESWTLPVAAGPGQDTDKTPGHAPAQDKVLSAARDPTLLPPETGGAGGEAPSKPKDSSFFDKFFKLDKGQEKVPGDSQQEAKRAEHQDKVDEVPGLSGQSDDVPAGKDIVDGKEKEGQELGTADCSVPGDPEGLETAKDDSQAAAIAENNNSIMSFFKTLVSPNKAETKKDPEDTGAEKSPTTSADLKSDKANFTSQETQGAGKNSKGCNPSGHTQSVTTPEPAKEGTKEKSGPTSLPLGKLFWKKSVKEDSVPTGAEENVVCESPVEIIKSKEVESALQTVDLNEGDAAPEPTEAKLKREESKPRTSLMAFLRQMSVKGDGGITHSEEINGKDSSCQTSDSTEKTITPPEPEPTGAPQKGKEGSSKDKKSAAEMNKQKSNKQEAKEPAQCTEQATVDTNSLQNGDKLQKRPEKRQQSLGGFFKGLGPKRMLDAQVQTDPVSIGPVGKPK

SEQ ID NO: 838 - protein, 175 aa, Homo sapiens
MEKIPVSAFLLLVALSYTLARDTTVKPGAKKDTKDSRPKLPQTLSRGWGDQLIWTQTYEEALYKSKTSNKPLMIIHHLDECPHSQALKKVFAENKEIQKLAEQFVLLNLVYETTDKHLSPDGQYVPRIMFVDPSLTVRADITGRYSNRLYAYEPADTALLLDNMKKALKLLKTEL

SEQ ID NO: 839 - protein, 252 aa, Homo sapiens
MGSVQENRMPEPRSRQPSSCLASRCLPGEQILAWAPGVRKGLEPELSGTLICTNFRVTFQPCGWQWNQDTPLNSEYDFALVNIGRLEAVSGLSRVQLLRPGSLHKFIPEEILIHGRDFRLLRVGFEAGGLEPQAFQVTMAIVQARAQSNQAQQYSGITLSKAGQGSGSRKPPIPLMETAEDWETERKKQAARGWRVSTVNERFDVATRLRCFSSSLIVSGSSSSSFQLILNSLSFSFLLFMTVSGFLTPLPS

SEQ ID NO: 840 - protein, 76 aa, Homo sapiens
MASKGLQDLKQQVEGTAQEAVSAAGAAAQQVVDQATEAGQKAMDQLAKTTQETIDKTANQASDTFSGIGKKFGLLK

SEQ ID NO: 841 - protein, 403 aa, Homo sapiens
MSGRVGDLSPRQKEALAKFRENVQDVLPALPNPDDYFLLRWLRARSFDLQKSEAMLRKHVEFRKQKDIDNIISWQPPEVIQQYLSGGMCGYDLDGCPVWYDIIGPLDAKGLLFSASKQDLLRTKMRECELLLQECAHQTTKLGRKVETITIIYDCEGLGLKHLWKPAVEAYGEFLCMFEENYPETLKRLFVVKAPKLFPVAYNLIKPFLSEDTRKKIMVLGANWKEVLLKHISPDQVPVEYGGTMTDPDGNPKCKSKINYGGDIPRKYYVRDQVKQQYEHSVQISRGSSHQVEYEILFPGCVLRWQFMSDGADVGFGIFLKTKMGERQRAGEMTEVLPNQRYNSHLVPEDGTLTCSDPGIYVLRFDNTYSFIHAKKVNFTVEVLLPDKASEEKMKQLGAGTPK

SEQ ID NO: 842 - protein, 437 aa, Homo sapiens
MEEALGRVKLMQADLGGTEILAPLQNIYRGPSIPGHPLQLFVFTDGEVTDTFSVIKEVRINRQKHRCFSFGIGEGTSTSLIKGIARASGGTSEFITGKDRMQSKALRTLKRSLQPVVEDVSLSWHLPPGLSAKMLSPEQTVIFRGQRLISYAQLTGRMPAAETTGEVCLKYTLQGKTFEDKVTFPLQPKPDVNLTIHRLAAKSLLQTKDMGLRETPASDKKDALNLSLESGVISSFTAFIAINKELNKPVQGPLAHRDVPRPILLGASAPLKIKCQSGFRKALHSDRPPSASQPRGELMCYKAKTFQMDDYSLCGLISHKDQHSPGFGENHLVQLIYHQNANGSWDLNEDLAKILGMSLEEIMAAQPAELVDSSGWATILAVIWLHSNGKDLKCEWELLERKAVAWMRAHAGSTMPSVVKAAITFLKSSVDPAIFAF

SEQ ID NO: 843 - protein, 193 aa, Homo sapiens
MGKQNSKLRPEVMQDLLESTDFTEHEIQEWYKGFLRDCPSGHLSMEEFKKIYGNFFPYGDASKFAEHVFRTFDANGDGTIDFREFIIALSVTSRGKLEQKLKWAFSMYDLDGNGYISKAEMLVIVQAIYKMVSSVMKMPEDESTPEKRTEKIFRQMDTNRDGKLSLEEFIRGAKSDPSIVRLLQCDPSSAGQF

SEQ ID NO: 844 - protein, 232 aa, Homo sapiens
MPSLWDRFSSSSTSSSPSSLPRTPTPDRPPRSAWGSATREEGFDRSTSLESSDCESLDSSNSGFGPEEDTAYLDGVSLPDFELLSDPEDEHLCANLMQLLQESLAQARLGSRRPARLLMPSQLVSQVGKELLRLAYSEPCGLRGALLDVCVEQGKSCHSVGQLALDPSLVPTFQLTLVLRLDSRLWPKIQGLFSSANSPFLPGFSQSLTLSTGFRVIKKKLYSSEQLLIEEC

SEQ ID NO: 845 - protein, 346 aa, Homo sapiens
  MISC_FEATURE (80)..(80): "Xaa" = any amino acid
MDPARKAGAQAMIWTAGWLLLLLLRGGAQALECYSCVQKADDGCSPNKMKTVKCAPGVDVCTEAVGAVETIHGQFSLAVXGCGSGLPGKNDRGLDLHGLLAFIQLQQCAQDRCNAKLNLTSRALDPAGNESAYPPNGVECYSCVGLSREACQGTSPPVVSCYNASDHVYKGCFDGNVTLTAANVTVSLPVRGCVQDEFCTRDGVTGPGFTLSGSCCQGSRCNSDLRNKTYFSPRIPPLVRLPPPEPTTVASTTSVTTSTSAPVRPTSTTKPMPAPTSQTPRQGVEHEASRDEEPRLTGGAAGHQDRSNSGQYPAKGGPQQPHNKGCVAPTAGLAALLLAVAAGVLL

SEQ ID NO: 846 - protein, 491 aa, Homo sapiens
MELSVLLFLALLTGLLLLLVQRHPNTHDRLPPGPRPLPLLGNLLQMDRRGLLKSFLRFREKYGDVFTVHLGPRPVVMLCGVEAIREALVDKAEAFSGRGKIAMVDPFFRGYGVIFANGNRWKVLRRFSVTTMRDFGMGKRSVEERIQEEAQCLIEELRKSKGALMDPTFLFQSITANIICSIVFGKRFHYQDQEFLKMLNLFYQTFSLISSVFGQLFELFSGFLKYFPGAHRQVYKNLQEINAYIGHSVEKHRETLDPSAPKDLIDTYLLHMEKEKSNAHSEFSHQNLNLNTLSLFFAGTETTSTTLRYGFLLMLKYPHVAERVYREIEQVIGPHRPPELHDRAKMPYTEAVIYEIQRFSDLLPMGVPHIVTQHTSFRGYIIPKDTEVFLILSTALHDPHYFEKPDAFNPDHFLDANGALKKTEAFIPFSLGKRICLGEGIARAELFLFFTTILQNFSMASPVAPEDIDLTPQECGVGKIPPTYQIRFLPR

SEQ ID NO: 847 - protein, 502 aa, Homo sapiens
MDLIPNLAVETWLLLAVSLVLLYLYGTRTHGLFKRLGIPGPTPLPLLGNVLSYRQGLWKFDTECYKKYGKMWGTYEGQLPVLAITDPDVIRTVLVKECYSVFTNRRSLGPVGFMKSAISLAEDEEWKRIRSLLSPTFTSGKLKEMFPIIAQYGDVLVRNLRREAEKGKPVTLKDIFGAYSMDVITGTSFGVNIDSLNNPQDPFVESTKKFLKFGFLDPLFLSIILFPFLTPVFEALNVSLFPKDTINFLSKSVNRMKKSRLNDKQKHRLDFLQLMIDSQNSKETESHKALSDLELAAQSIIFIFAGYETTSSVLSFTLYELATHPDVQQKLQKEIDAVLPNKAPPTYDAVVQMEYLDMVVNETLRLFPVAIRLERTCKKDVEINGVFIPKGSMVVIPTYALHHDPKYWTEPEEFRPERFSKKKDSIDPYIYTPFGTGPRNCIGMRFALMNMKLALIRVLQNFSFKPCKETQIPLKLDTQGLLQPEKPIVLKVDSRDGTLSGE

SEQ ID NO: 848 - protein, 367 aa, Homo sapiens
MVMEVGTLDAGGLRALLGERAAQCLLLDCRSFFAFNAGHIAGSVNVRFSTIVRRRAKGAMGLEHIVPNAELRGRLLAGAYHAVVLLDERSAALDGAKRDGTLALAAGALCREARAAQVFFLKGGYEAFSASCPELCSKQSTPMGLSLPLSTSVPDSAESGCSSCSTPLYDQGGPVEILPFLYLGSAYHASRKDMLDALGITALINVSANCPNHFEGHYQYKSIPVEDNHKADISSWFNEAIDFIDSIKNAGGRVFVHCQAGISRSATICLAYLMRTNRVKLDEAFEFVKQRRSIISPNFSFMGQLLQFESQVLAPHCSAEAGSPAMAVLDRGTSTTTVFNFPVSIPVHSTNSALSYLQSPITTSPSC

SEQ ID NO: 849 - protein, 2314 aa, Homo sapiens
MRILKRFLACIQLLCVCRLDWANGYYRQQRKLVEEIGWSYTGALNQKNWGKKYPTCNSPKQSPINIDEDLTQVNVNLKKLKFQGWDKTSLENTFIHNTGKTVEINLTNDYRVSGGVSEMVFKASKITFHWGKCNMSSDGSEHSLEGQKFPLEMQIYCFDADRFSSFEEAVKGKGKLRALSILFEVGTEENLDFKAIIDGVESVSRFGKQAALDPFILLNLLPNSTDKYYIYNGSLTSPPCTDTVDWIVFKDTVSISESQLAVFCEVLTMQQSGYVMLMDYLQNNFREQQYKFSRQVFSSYTGKEEIHEAVCSSEPENVQADPENYTSLLVTWERPRVVYDTMIEKFAVLYQQLDGEDQTKHEFLTDGYQDLGAILNNLLPNMSYVLQIVAICTNGLYGKYSDQLIVDMPTDNPELDLFPELIGTEEIIKEEEEGKDIEEGAIVNPGRDSATNQIRKKEPQISTTTHYNRIGTKYNEAKTNRSPTRGSEFSGKGDVPNTSLNSTSQPVTKLATEKDISLTSQTVTELPPHTVEGTSASLNDGSKTVLRSPHMNLSGTAESLNTVSITEYEEESLLTSFKLDTGAEDSSGSSPATSAIPFISENISQGYIFSSENPETITYDVLIPESARNASEDSTSSGSEESLKDPSMEGNVWFPSSTDITAQPDVGSGRESFLQTNYTEIRVDESEKTTKSFSAGPVMSQGPSVTDLEMPHYSTFAYFPTEVTPHAFTPSSRQQDLVSTVNVVYSQTTQPVYNGETPLQPSYSSEVFPLVTPLLLDNQILNTTPAASSSDSALHATPVFPSVDVSFESILSSYDGAPLLPFSSASFSSELFRHLHTVSQILPQVTSATESDKVPLHASLPVAGGDLLLEPSLAQYSDVLSTTHAASETLEFGSESGVLYKTLMFSQVEPPSSDAMMHARSSGPEPSYALSDNEGSQHIFTVSYSSAIPVHDSVGVTYQGSLFSGPSHIPIPKSSLITPTASLLQPTHALSGDGEWSGASSDSEFLLPDTDGLTALNISSPVSVAEFTYTTSVFGDDNKALSKSEIIYGNETELQIPSFNEMVYPSESTVMPNMYDNVNKLNASLQETSVSISSTKGMFPGSLAHTTTKVFDHEISQVPENNFSVQPTHTVSQASGDTSLKPVLSANSEPASSDPASSEMLSPSTQLLFYETSASFSTEVLLQPSFQASDVDTLLKTVLPAVPSDPILVETPKVDKISSTMLHLIVSNSASSENMLHSTSVPVFDVSPTSHMHSASLQGLTISYASEKYEPVLLKSESSHQVVPSLYSNDELFQTANLEINQAHPPKGRHVFATPVLSIDEPLNTLINKLIHSDEILTSTKSSVTGKVFAGIPTVASDTFVSTDHSVPIGNGHVAITAVSPHRDGSVTSTKLLFPSKATSELSHSAKSDAGLVGGGEDGDTDDDGDDDDDRDSDGLSIHKCMSCSSYRESQEKVMNDSDTHENSLMDQNNPISYSLSENSEEDNRVTSVSSDSQTGMDRSPGKSPSANGLSQKHNDGKEENDIQTGSALLPLSPESKAWAVLTSDEESGSGQGTSDSLNENETSTDFSFADTNEKDADGILAAGDSEITPGFPQSPTSSVTSENSEVFHVSEAEASNSSHESRIGLAEGLESEKKAVIPLVIVSALTFICLVVLVGILIYWRKCFQTAHFYLEDSTSPRVISTPPTPIFPISDDVGAIPIKHFPKHVADLHASSGFTEEFETLKEFYQEVQSCTVDLGITADSSNHPDNKHKNRYINIVAYDHSRVKLAQLAEKDGKLTDYINANYVDGYNRPKAYIAAQGPLKSTAEDFWRMIWEHNVEVIVMITNLVEKGRRKCDQYWPADGSEEYGNFLVTQKSVQVLAYYTVRNFTLRNTKIKKGSQKGRPSGRVVTQYHYTQWPDMGVPEYSLPVLTFVRKAAYAKRHAVGPVVVHCSAGVGRTGTYIVLDSMLQQIQHEGTVNIFGFLKHIRSQRNYLVQTEEQYVFIHDTLVEAILSKETEVLDSHIHAYVNALLIPGPAGKTKLEKQFQLLSQSNIQQSDYSAALKQCNREKNRTSSIIPVERSRVGISSLSGEGTDYINASYIMGYYQSNEFIITQHPLLHTIKDFWRMIWDHNAQLVVMIPDGQNMAEDEFVYWPNKDEPINCESFKVTLMAEEHKCLSNEEKLIIQDFILEATQDDYVLEVRHFQCPKWPNPDSPISKTFELISVIKEEAANRDGPMIVHDEHGGVTAGTFCALTTLMHQLEKENSVDVYQVAKMINLMRPGVFADIEQYQFLYKVILSLVSTRQEENPSTSLDSNGAALPDGNIAESLESLV

SEQ ID NO: 850 - protein, 291 aa, Homo sapiens
MQRARPTLWAAALTLLVLLRGPPVARAGASSGGLGPVVRCEPCDARALAQCAPPPAVCAELVREPGCGCCLTCALSEGQPCGIYTERCGSGLRCQPSPDEARPLQALLDGRGLCVNASAVSRLRAYLLPAPPAPGNASESEEDRSAGSVESPSVSSTHRVSDPKFHPLHSKIIIIKKGHAKDSQRYKVDYESQSTDTQNFSSESKRETEYGPCRREMEDTLNHLKFLNVLSPRGVHIPNCDKKGFYKKKQCRPSKGRKRGFCWCVDKYGQPLPGYTTKGKEDVHCYSMQSK

SEQ ID NO: 851 - protein, 240 aa, Homo sapiens
MTPHRLLPPLLLLLALLLAASPGGALARCPGCGQGVQAGCPGGCVEEEDGGSPAEGCAEAEGCLRREGQECGVYTPNCAPGLQCHPPKDDEAPLRALLLGRGRCLPARAPAVAEENPKESKPQAGTARPQDVNRRDQQRNPGTSTTPSQPNSAGVQDTEMGPCRRHLDSVLQQLQTEVYRGAQTLYVPNCDHRGFYRKRQCRSSQGQRRGPCWCVDRMGKSLPGSPDGNGSSSCPTGSSG

SEQ ID NO: 852 - protein, 114 aa, Homo sapiens
MNVLLGSVVIFATFVTLCNASCYFIPNEGVPGDSTRKCMDLKGNKHPINSEWQTDNCETCTCYETEISCCTLVSTPVGYDKDNCQRIFKKEDCKYIVVEKKDPKKTCSVSEWII

SEQ ID NO: 853 - protein, 77 aa, Homo sapiens
MNVLLGSVVIFATFVTLCNASCYFIPNEGVPGDSTRMFLHLWVMTKTTAKESSRRRTASISWWRRRTQKRPVLSVNG

SEQ ID NO: 854 - protein, 334 aa, Homo sapiens
MNLSLVLAAFCLGIASAVPKFDQNLDTKWYQWKATHRRLYGANEEGWRRAVWEKNMKMIELHNGEYSQGKHGFTMAMNAFPDMTNEEFRQMMGCFRNQKFRKGKVFREPLFLDLPKSVDWRKKGYVTPVKNQKQCGSCWAFSATGALEGQMFRKTGKLVSLSEQNLVDCSRPQGNQGCNGGFMARAFQYVKENGGLDSEESYPYVAVDEICKYRPENSVANDTGFTVVAPGKEKALMKAVATVGPISVAMDAGHSSFQFYKSGIYFEPDCSSKNLDHGVLVVGYGFEGANSNNSKYWLVKNSWGPEWGSNGYVKIAKDKNNHCGIATAASYPNV

SEQ ID NO: 855 - protein, 379 aa, Homo sapiens
MEQLSSANTRFALDLFLALSENNPAGNIFISPFSISSAMAMVFLGTRGNTAAQLSKTFHFNTVEEVHSRFQSLNADINKRGASYILKLANRLYGEKTYNFLPEFLVSTQKTYGADLASVDFQHASEDARKTINQWVKGQTEGKIPELLASGMVDNMTKLVLVNAIYFKGNWKDKFMKEATTNAPFRLNKKDRKTVKMMYQKKKFAYGYIEDLKCRVLELPYQGEELSMVILLPDDIEDESTGLKKIEEQLTLEKLHEWTKPENLDFIEVNVSLPRFKLEESYTLNSDLARLGVQDLFNSSKADLSGMSGARDIFISKIVHKSFVEVNEEGTEAAAATAGIATFCMLMPEENFTADHPFLFFIRHNSSGSILFLGRFSSP

SEQ ID NO: 856 - protein, 433 aa, Homo sapiens
MERMLPLLALGLLAAGFCPAVLCHPNSPLDEENLTQENQDRGTHVDLGLASANVDFAFSLYKQLVLKALDKNVIFSPLSISTALAFLSLGAHNTTLTEILKASSSPHGDLLRQKFTQSFQHLRAPSISSSDELQLSMGNAMFVKEQLSLLDRFTEDAKRLYGSEAFATDFQDSAAAKKLINDYVKNGTRGKITDLIKDPDSQTMMVLVNYIFFKAKWEMPFDPQDTHQSRFYLSKKKWVMVPMMSLHHLTIPYFRDEELSCTVVELKYTGNASALFILPDQDKMEEVEAMLLPETLKRWRDSLEFREIGELYLPKFSISRDYNLNDILLQLGIEEAFTSKADLSGITGARNLAVSQVVHKVVSDVFEEGTEASAATAVKITLLSALVETRTIVRFNRPFLMIIVPTDTQNIFFMSKVTNPSKPRACIKQWGSQ

SEQ ID NO: 857 - protein, 402 aa, Homo sapiens [sequence omitted]

SEQ ID NO: 858 - protein, 375 aa, Homo sapiens
MDALQLANSAFAVDLFKQLCEKEPLGNVLFSPICLSTSLSLAQVGAKGDTANEIGQVLHFENVKDIPFGFQTVTSDVNKLSSFYSLKLIKRLYVDKSLNLSTEFISSTKRPYAKELETVDFKDKLEETKGQINNSIKDLTDGHFENILADNSVNDQTKILVVNAAYFVGKWMKKFPESETKECPFRLNKTDTKPVQMMNMEATFCMGNIDSINCKIIELPFQNKHLSMFILLPKDVEDESTGLEKIEKQLNSESLSQWTNPSTMANAKVKLSIPKFKVEKMIDPKACLENLGLKHIFSEDTSDFSGMSETKGVALSNVIHKVCLEITEDGGDSIEVPGARILQHKDELNADHPFIYIIRHNKTRNIIFFGKFCSP

SEQ ID NO: 859 - protein, 93 aa, Homo sapiens
MLTELEKALNSIIDVYHKYSLIKGNFHAVYRDDLKKLLETECPQYIRKKGADVWFKELDINTDGAVNFQEFLILVIKMGVAAHKKSHEESHKE

SEQ ID NO: 860 - protein, 138 aa, Homo sapiens
MPNFSGNWKIIRSENFEELLKVLGVNVMLRKIAVAAASKPAVEIKQEGDTFYIKTSTTVRTTEINFKVGEEFEEQTVDGRPCKSLVKWESENKMVCEQKLLKGEGPKTSWTRELTNDGELILTMTADDVVCTRVYVRE

SEQ ID NO: 861 - protein, 770 aa, Homo sapiens
MANSMNGRNPGGRGGNPRKGRILGIIDAIQDAVGPPKQAAADRRTVEKTWKLMDKVVRLCQNPKLQLKNSPPYILDILPDTYQHLRLILSKYDDNQKLAQLSENEYFKIYIDSLMKKSKRAIRLFKEGKERMYEEQSQDRRNLTKLSLIFSHMLAEIKAIFPNGQFQGDNFRITKADAAEFWRKFFGDKTIVPWKVFRQCLHEVHQISSSLEAMALKSTIDLTCNDYISVFEFDIFTRLFQPWGSILRNWNFLAVTHPGYMAFLTYDEVKARLQKYSTKPGSYIFRLSCTRLGQWAIGYVTGDGNILQTIPHNKPLFQALIDGSREGFYLYPDGRSYNPDLTGLCEPTPHDHIKVTQEQYELYCEMGSTFQLCKICAENDKDVKIEPCGHLMCTSCLTAWQESDGQGCPFCRCEIKGTEPIIVDPFDPRDEGSRCCSIIDPFGMPMLDLDDDDDREESLMMNRLANVRKCTDRQNSPVTSPGSSPLAQRRKPQPDPLQIPHLSLPPVPPRLDLIQKGIVRSPCGSPTGSPKSSPCMVRKQDKPLPAPPPPLRDPPPPPPERPPPIPPDNRLSRHIHHVESVPSRDPPMPLEAWCPRDVFGTNQLVGCRLLGEGSPKPGITASSNVNGRHSRVGSDPVLMRKHRRHDLPLEGAKVFSNGHLGSEEYDVPPRLSPPPPVTTLLPSIKCTGPLANSLSEKTRDPVEEDDDEYKIPSSHPVSLNSQPSHCHNVKPPVRSCDNGHCMLNGTHGPSSEKKSNIPDLSIYLKGTYRI

SEQ ID NO: 862 - protein, 690 aa, Homo sapiens
MPWEEPAGEKPSCSHSQKAFHMEPAQKPCFTTDMVTWALLCISAETVRGEAPSQPRGIPHRSPVSVDDLWLEKTQRKKLQKQAHVERRLHIGAVHKDGVKCWRKTIITSPESLNLPRRSHPLSQSAPTGLNHMGWPEHTPGTAMPDGALDTAVCADEVGSEEDLYDDLHSSSHHYSHPGGGGEQLAINELISDGSVVCAEALWDHVTMDDQELGFKAGDVIEVMDATNREWWWGRVADGEGWFPASFVRLRVNQDEPADDDAPLAGNSGAEDGGAEAQSSKDQMRTNVINEILSTERDYIKHLRDICEGYVRQCRKRADMFSEEQLRTIFGNIEDIYRCQKAFVKALEQRFNRERPHLSELGACFLEHQADFQIYSEYCNNHPNACVELSRLTKLSKYVYFFEACRLLQKMIDISLDGFLLTPVQKICKYPLQLAELLKYTHPQHRDFKDVEAALHAMKNVAQLINERKRRLENIDKIAQWQSSIEDWEGEDLLVRSSELIYSGELTRVTQPQAKSQQRMFFLFDHQLIYCKKDLLRRDVLYYKGRLDMDGLEVVDLEDGKDRDLHVSIKNAFRLHRGATGDSHLLCTRKPEQKQRWLKAFAREREQVQLDQETGFSITELQRKQAMLNASKQQVTGKPKAVGRPCYLTRQKHPALPSNRPQQQVLVLAEPRRKPSTFWHSISRLAPFRK

SEQ ID NO: 863 - protein, 670 aa, Homo sapiens
MPWEEPAGEKPSCSHSQKAFHMEPAQKPCFTTDMVTWALLCISAETVRGEAPSQPRGIPHRSPVSVDDLWLEKTQRKKLQKQAHVERRLHIGAVHKDGVKCWRKTIITSPESLNLPRRSHPLSQSAPTGLNHMGWPEHTPGTAMPDGALDTAVCADEVGSEEDLYDDLHSSSHHYSHPGGGGEQLAINELISDGSVVCAEALWDHVTMDDQELGFKAGDVIEVMDATNREWWWGRVADGEGWFPASFVRLRVNQDEPADDDAPLAGNSGAEDGGAEAQSSKDQMRTNVINEILSTERDYIKHLRDICEGYVRQCRKRADMFSEEQLRTIFGNIEDIYRCQKAFVKALEQRFNRERPHLSELGACFLEHQADFQIYSEYCNNHPNACVELSRLTKLSKYVYFFEACRLLQKMIDISLDGFLLTPVQKICKYPLQLAELLKYTHPQHRDFKDVEAALHAMKNVAQLINERKRRLENIDKIAQWQSSIEDWEGEDLLVRSSELIYSGELTRVTQPQAKSQQRMFFLFDHQLIYCKKDLLRRDVLYYKGRLDMDGLEVVDLEDGKDRDLHVSIKNAFRLHRGATGDSHLLCTRKPEQKQRWLKAFAREREQVQLDQETGFSITELQRKQAMLNASKQQVTGKPKGRRTAAPPPRLPGPYPADIIPFSEPQSQAS

SEQ ID NO: 864 - protein, 91 aa, Homo sapiens
MKLAVTLTLVTLALCCSSASAEICPSFQRVIETLLMDTPSSYEAAMELFSPDQDMREAGAQLKKLVDTLPQKPRESIIKLMEKIAQSSLCN

SEQ ID NO: 865 - protein, 783 aa, Homo sapiens
MESPGESGAGSPGAPSPSSFTTGHLAREKPAQDPLYDVPNASGGQAGGPQRPGRVVSLRERLLLTRPVWLQLQANAAAALHMLRTEPPGTFLVRKSNTRQCQALCMRLPEASGPSFVSSHYILESPGGVSLEGSELMFPDLVQLICAYCHTRDILLLPLQLPRAIHHAATHKELEAISHLGIEFWSSSLNIKAQRGPAGGPVLPQLKARSPQELDQGTGAALCFFNPLFPGDLGPTKREKFKRSFKVRVSTETSSPLSPPAVPPPPVPVLPGAVPSQTERLPPCQLLRRESSVGYRVPAGSGPSLPPMPSLQEVDCGSPSSSEEEGVPGSRGSPATSPHLGRRRPLLRSMSAAFCSLLAPERQVGRAAAALMQDRHTAAGQLVQDLLTQVRDGQRPQELEGIRQALSRARAMLSAELGPEKLVSPKRLEHVLEKSLHCSVLKPLRPILAARLRRRLAADGSLGRLAEGLRLARAQGPGAFGSHLSLPSPVELEQVRQKLLQLVRTYSPSAQVKRLLQACKLLYMALRTQEGEGSGADGFLPLLSLVLAHCDLPELLLEAEYMSELLEPSLLTGEGGYYLTSLSASLALLSGLGQAHTLPLSPVQELRRSLSLWEQRRLPATHCFQHLLRVAYQDPSSGCTSKTLAVPPEASIATLNQLCATKFRVTQPNTFGLFLYKEQGYHRLPPGALAHRLPTTGYLVYRRAEWPETQGAVTEEEGSGQSEARSRGEEQGCQGDGDAGVKASPRDIREQSETTAEGGQGQAQEGPAQPGEPEAEGSRAAEE

SEQ ID NO: 866 - protein, 419 aa, Homo sapiens
MHLLGFFSVACSLLAAALLPGPREAPAAAAAFESGLDLSDAEPDAGEATAYASKDLEEQLRSVSSVDELMTVLYPEYWKMYKCQLRKGGWQHNREQANLNSRTEETIKFAAAHYNTEILKSIDNEWRKTQCMPREVCIDVGKEFGVATNTFFKPPCVSVYRCGGCCNSEGLQCMNTSTSYLSKTLFEITVPLSQGPKPVTISFANHTSCRCMSKLDVYRQVHSIIRRSLPATLPQCQAANKTCPTNYMWNNHICRCLAQEDFMFSSDAGDDSTDGFHDICGPNKELDEETCQCVCRAGLRPASCGPHKELDRNSCQCVCKNKLFPSQCGANREFDENTCQCVCKRTCPRNQPLNPGKCACECTESPQKCLLKGKKFHHQTCSCYRRPCTNRQKACEPGFSYSEEVCRCVPSYWKRPQMS

SEQ ID NO: 867 - protein, 192 aa, Homo sapiens
MQAIKCVVVGDGAVGKTCLLISYTTNAFPGEYIPTVFDNYSANVMVDSKPVNLGLWDTAGQEDYDRLRPLSYPQTDVFLICFSLVSPASYENVRAKWFPEVRHHCPSTPIILVGTKLDLRDDKDTIEKLKEKKLAPITYPQGLALAKEIDSVKYLECSALTQRGLKTVFDEAIRAVLCPQPTRQQKRACSLL

SEQ ID NO: 868 - protein, 466 aa, Homo sapiens
MSTRSVSSSSYRRMFGGPGTASRPSSSRSYVTTSTRTYSLGSALRPSTSRSLYASSPGGVYATRSSAVRLRSSVPGVRLLQDSVDFSLADAINTEFKNTRTNEKVELQELNDRFANYIDKVRFLEQQNKILLAELEQLKGQGKSRLGDLYEEEMRELRRQVDQLTNDKARVEVERDNLAEDIMRLREKLQEEMLQREEAENTLQSFRQDVDNASLARLDLERKVESLQEEIAFLKKLHEEEIQELQAQIQEQHVQIDVDVSKPDLTAALRDVRQQYESVAAKNLQEAEEWYKSKFADLSEAANRNNDALRQAKQESTEYRRQVQSLTCEVDALKGTNESLERQMREMEENFAVEAANYQDTIGRLQDEIQNMKEEMARHLREYQDLLNVKMALDIEIATYRKLLEGEESRISLPLPNFSSLNLRETNLDSLPLVDTHSKRTFLIKTVETRDGQVINETSQHHDDLE

SEQ ID NO: 869 - protein, 251 aa, Homo sapiens
MSDTEEQEYEEEQPEEEAAEEEEEEEERPKPSRPVVPPLIPPKIPEGERVDFDDIHRKRMEKDLLELQTLIDVHFEQRKKEEEELVALKERIERRRSERAEQQRFRTEKERERQAKLAEEKMRKEEEEAKKRAEDDAKKKKVLSNMGAHFGGYLVKAEQKRGKRQTGREMKVRILSERKKPLDIDYMGEEQLREKAQELSDWIHQLESEKFDLMAKLKQQKYEINVLYNRISHAQKFRKGAGKGRVGGRWK

SEQ ID NO: 870 - protein, 585 aa, Homo sapiens
MSQQHTLPVTLSPALSQELLKTVPPPVNTHQEQMKQPTPLPPPCQKVPVELPVEVPSKQEEKHMTAVKGLPEQECEQQQKEPQEQELQQQHWEQHEEYQKAENPEQQLKQEKTQRDQQLNKQLEEEKKLLDQQLDQELVKRDEQLGMKKEQLLELPEQQEGHLKHLEQQEGQLKHPEQQEGQLELPEQQEGQLELPEQQEGQLELPEQQEGQLELPEQQEGQLELPQQQEGQLELSEQQEGQLELSEQQEGQLELSEQQEGQLKHLEHQEGQLEVPEEQMGQLKYLEQQEGQLKHLDQQEKQPELPEQQMGQLKHLEQQEGQPKHLEQQEGQLEQLEEQEGQLKHLEQQEGQLEHLEHQEGQLGLPEQQVLQLKQLEKQQGQPKHLEEEEGQLKHLVQQEGQLKHLVQQEGQLEQQERQVEHLEQQVGQLKHLEEQEGQLKHLEQQQGQLEVPEQQVGQPKNLEQEEKQLELPEQQEGQVKHLEKQEAQLELPEQQVGQPKHLEQQEKHLEHPEQQDGQLKHLEQQEGQLKDLEQQKGQLEQPVFAPAPGQVQDIQPALPTKGEVLLPVEHQQQKQEVQWPPKHK

SEQ ID NO: 871 - protein, 284 aa, Homo sapiens
MDAIKKKMQMLKLDKENALDRAEQAEADKKAAEDRSKQLEDELVSLQKKLKGTEDELDKYSEALKDAQEKLELAEKKATDAEADVASLNRRIQLVEEELDRAQERLATALQKLEEAEKAADESERGMKVIESRAQKDEEKMEIQEIQLKEAKHIAEDADRKYEEVARKLVIIESDLERAEERAELSEGQVRQLEEQLRIMDQTLKALMAAEDKYSQKEDRYEEEIKVLSDKLKEAETRAEFAERSVTKLEKSIDDLEEKVAHAKEENLSMHQMLDQTLLELNNM

SEQ ID NO: 872 - protein, 89 aa, Homo sapiens
MSSQQQKQPCIPPPQLQQQQVKQPCQPPPQEPCIPKTKEPCHPKVPEPCHPKVPEPCQPKLPEPCHPKVPEPCPSIVTPAPAQQKTKQK

SEQ ID NO: 873 - protein, 456 aa, Homo sapiens
MTTTFLQTSSSTFGGGSTRGGSLLAGGGGFGGGSLSGGGGSRSISASSARFVSSGSGGGYGGGMRVCGFGGGAGSVFGGGFGGGVGGGFGGGFGGGDGGLLSGNEKITMQNLNDRLASYLDKVRALEEANADLEVKIHDWYQKQTPASPECDYSQYFKTIEELRDKIMATTIDNSRVILEIDNARLAADDFRLKYENELALRQGVEADINGLRRVLDELTLARTDLEMQIEGLNEELAYLKKNHEEEMKEFSSQLAGQVNVEMDAAPGVDLTRVLAEMREQYEAMAEKNRRDVEAWFFSKTEELNKEVASNTEMIQTSKTEITDLRRTMQELEIELQSQLSMKAGLENSLAETECRYATQLQQIQGLIGGLEAQLSELRCEMEAQNQEYKMLLDIKTRLEQEIATYRSLLEGQDAKMAGIGIREASSGGGGSSSNFHINVEESVDGQVVSSHKREI

SEQ ID NO: 874 - protein, 2033 aa, Homo sapiens
MFKGLSKGSQGKGSPKGSPAKGSPKGSPSRHSRAATQELALLISRMQANADQVERDILETQKRLQQDRLNSEQSQALQHQQETGRSLKEAEVLLKDLFLDVDKARRLKHPQAEEIEKDIKQLHERVTQECAEYRALYEKMVLPPDVGPRVDWARVLEQKQKQVCAGQYGPGMAELEQQIAEHNILQKEIDAYGQQLRSLVGPDAATIRSQYRDLLKAASWRGQSLGSLYTHLQGCTRQLSALAEQQRRILQQDWSDLMADPAGVRREYEHFKQHELLSQEQSVNQLEDDGERMVELRHPAVGPIQAHQEALKMEWQNFLNLCICQETQLQHVEDYRRFQEEADSVSQTLAKLNSNLDAKYSPAPGGPPGAPTELLQQLEAEEKRLAVTERATGDLQRRSRDVAPLPQRRNPPQQPLHVDSICDWDSGEVQLLQGERYKLVDNTEPHAWVVQGPGGETKRAPAACFCIPAPDPDAVARASRLASELQALKQKLATVQSRLKASAVESLRPSQQAPSGSDLANPQAQKLLTQMTRLDGDLGQIERQVLAWARAPLSRPTPLEDLEGRIHSHEGTAQRLQSLGTEKETAQKECEAFLSTRPVGPAALQLPVALNSVKNKFSDVQVLCSLYGEKAKAALDLERQIQDADRVIRGFEATLVQEAPIPAEPGALQERVSELQRQRRELLEQQTCVLRLHRALKASEHACAALQNNFQEFCQDLPRQQRQVRALTDRYHAVGDQLDLREKVVQDAALTYQQFKNCKDNLSSWLEHLPRSQVRPSDGPSQIAYKLQAQKRLTQEIQSRERDRATASHLSQALQAALQDYELQADTYRCSLEPTLAVSAPKRPRVAPLQESIQAQEKNLAKAYTEVAAAQQQLLQQLEFARKMLEKKELSEDIRRTHDAKQGSESPAQAGRESEALKAQLEEERKRVARVQHELEAQRSQLLQLRTQRPLERLEEKEVVEFYRDPQLEGSLSRVKAQVEEEGKRRAGLQADLEVAAQKVVQLESKRKTMQPHLLTKEVTQVERDPGLDSQAAQLRIQIQQLRGEDAVISARLEGLKKELLALEKREVDVKEKVVVKEVVKVEKNLEMVKAAQALRLQMEEDAARRKQAEEAVAKLQARIEDLERAISSVEPKVIVKEVKKVEQDPGLLQESSRLRSLLEEERTKNATLARELSDLHSKYSVVEKQRPKVQLQERVHEIFQVDPETEQEITRLKAKLQEMAGKRSGVEKEVEKLLPDLEVLRAQKPTVEYKEVTQEVVRHERSPEVLREIDRLKAQLNELVNSHGRSQEQLIRLQGERDEWRRERAKVETKTVSKEVVRHEKDPVLEKEAERLRQEVREAAQKRRAAEDAVYELQSKRLLLERRKPEEKVVVQEVVVTQKDPKLREEHSRLSGSLDEEVGRRRQLELEVQQLRAGVEEQEGLLSFQEDRSKKLAVERELRQLTLRIQELEKRPPTVQEKIIMEEVVKLEKDPDLEKSTEALRWDLDQEKTQVTELNRECKNLQVQIDVLQKAKSQEKTIYKEVIRVQKDRVLEDERARVWEMLNRERTARQAREEEARRLRERIDRAETLGRTWSREESELQRARDQADQECGRLQQELRALERQKQQQTLQLQEESKLLSQKTESERQKAAQRGQELSRLEAAILREKDQIYEKERTLRDLHAKVSREELSQETQTRETNLSTKISILEPETGKDMSPYEAYKRGIIDRGQYLQLQELECDWEEVTTSGPCGEESVLLDRKSGKQYSIEAALRCRRISKEEYHLYKDGHLPISEFALLVAGETKPSSSLSIGSIISKSPLASPAPQSTSFFSPSFSLGLGDDSFPIAGIYDTTTDNKCSIKTAVAKNMLDPITGQKLLEAQAATGGIVDLLSRERYSVHKAMERGLIENTSTQRLLNAQKAFTGIEDPVTKKRLSVGEAVQKGWMPRESVLPHLQVQHLTGGLIDPKRTGRIPIQQALLSGMISEELAQLLQDESSYEKDLTDPISKERLSYKEAMGRCRKDPLSGLLLLPAALEGYRCYRSASPTVPRSLR

SEQ ID NO: 875 - protein, 165 aa, Homo sapiens
MVNPGSSSQPPPVTAGSLSWKRCAGCGGKIADRFLLYAMDSYWHSRCLKCSCCQAQLGDIGTSCYTKSGMILCRNDYIRLFGNSGACSACGQSIPASELVMRAQGNVYHLKCFTCSTCRNRLVPGDRFHYINGSLFCEHDRPTALINGHLNSLQSNPLLPDQKVC

SEQ ID NO: 876 - protein, 1124 aa, Homo sapiens
MADGPRCKRRKQANPRRNNVTNYNTVVETNSDSDDEDKLHIVEEESVTDAADCEGVPEDDLPTDQTVLPGRSSEREGNAKNCWEDDRKEGQEILGPEAQADEAGCTVKDDECESDAENEQNHDPNVEEFLQQQDTAVIFPEAPEEDQRQGTPEASGHDENGTPDAFSQLLTCPYCDRGYKRFTSLKEHIKYRHEKNEDNFSCSLCSYTFAYRTQLERHMTSHKSGRDQRHVTQSGCNRKFKCTECGKAFKYKHHLKEHLRIHSGEKPYECPNCKKRFSHSGSYSSHISSKKCISLIPVNGRPRTGLKTSQCSSPSLSASPGSPTRPQIRQKIENKPLQEQLSVNQIKTEPVDYEFKPIVVASGINCSTPLQNGVFTGGGPLQATSSPQGMVQAVVLPTVGLVSPISINLSDIQNVLKVAVDGNVIRQVLENNQANLASKEQETINASPIQQGGHSVISAISLPLVDQDGTTKIIINYSLEQPSQLQVVPQNLKKENPVATNSCKSEKLPEDLTVKSEKDKSFEGGVNDSTCLLCDDCPGDINALPELKHYDLKQPTQPPPLPAAEAEKPESSVSSATGDGNLSPSQPPLKNLLSLLKAYYALNAQPSAEELSKIADSVNLPLDVVKKWFEKMQAGQISVQSSEPSSPEPGKVNIPAKNNDQPQSANANEPQDSTVNLQSPLKMTNSPVLPVGSTTNGSRSSTPSPSPLNLSSSRNTQGYLYTAEGAQEEPQVEPLDLSLPKQQGELLERSTITSVYQNSVYSVQEEPLNLSCAKKEPQKDSCVTDSEPVVNVIPPSANPINIAIPTVTAQLPTIVAIADQNSVPCLRALAANKQTILIPQVAYTYSTTVSPAVQEPPLKVIQPNGNQDERQDTSSEGVSNVEDQNDSDSTPPKKKMRKTENGMYACDLCDKIFQKSSSLLRHKYEHTGKRPHECGICKKAFKHKHHLIEHMRLHSGEKPYQCDKCGKRFSHSGSYSQHMNHRYSYCKREAEERDSTEQEEAGPEILSNEHVGARASPSQGDSDERESLTREEDEDSEKEEEEEDKEMEELQEEKECEKPQGDEEEEEEEEEVEEEEVEEAENEGEEAKTEGLMKDDRAESQASSLGQKVGESSEQVSEEKTNEA

SEQ ID NO: 877 - protein, 302 aa, Homo sapiens
MDVLASYSIFQELQLVHDTGYFSALPSLEETWQQTCLELERYLQTEPRRISETFGEDLDCFLHASPPPCIEESFRRLDPLLLPVEAAICEKSSAVDILLSRDKLLSETCLSLQPASSSLDSYTAVNQAQLNAVTSLTPPSSPELSRHLVKTSQTLSAVDGTVTLKLVAKKAALSSVKVGGVATAAAAVTAAGAVKSGQSDSDQGGLGAEACPENKKRVHRCQFNGCRKVYTKSSHLKAHQRTHTGEKPYKCSWEGCEWRFARSDELTRHYRKHTGAKPFKCNHCDRCFSRSDHLALHMKRHI

SEQ ID NO: 878 - protein, 279 aa, Homo sapiens
MHCHAELRLSSPGQLKAARRRYKTFMIDEILSKETCDYFEKLSLYSVCPSLVVRPKPLHSCTGSPSLRAYPLLSVITRQPTVISHLVPATPGIAQALSCHQVTEAVSAEAPGGEALASSESETEQPTPRQKKPRRSRTIFTELQLMGLEKKFQKQKYLSTPDRLDLAQSLGLTQLQVKTWYQNRRMKWKKMVLKGGQEAPTKPKGRPKKNSIPTSEEIEAEEKMNSQAQGQEQLEPSQGQEELCEAQEPKARDVPLEMAEPPDPPQELPIPSSEPPPLS

SEQ ID NO: 879 - protein, 154 aa, Homo sapiens [sequence omitted]

SEQ ID NO: 880 - protein, 279 aa, Homo sapiens
MSPAEQLKQMAAQQQQRAKLMQQKQQQQQQQQQQQQQQHSNQTSNWSPLGPPSSPYGAAFTAEKPNSPMMYPQAFNNQNPIVPPMANNLQKTTMNNYLPQNHMNMINQQPNNLGTNSLNKQHNILTYGNTKPLTHFNADLSQRMTPPVANPNKNPLMPYIQQQQQQQQQQQQQQQQQQPPPPQLQAPRAHLSEDQKRLLLMKQKGVMNQPMAYAALPSHGQVSVKVTHSSSSSCGAFQDCRCVMFYKASTVVGSNCLQKTSLQHPQVVARFGVFFFHFS

SEQ ID NO: 881 - protein, 1437 aa, Homo sapiens
MKDIDIGKEYIIPSPGYRSVRERTSTSGTHRDREDSKFRRTRPLECQDALETAARAEGLSLDASMHSQLRILDEEHPKGKYHHGLSALKPIRTTSKHQHPVDNAGLFSCMTFSWLSSLARVAHKKGELSMEDVWSLSKHESSDVNCRRLERLWQEELNEVGPDAASLRRVVWIFCRTRLILSIVCLMITQLAGFSGPAFMVKHLLEYTQATESNLQYSLLLVLGLLLTEIVRSWSLALTWALNYRTGVRLRGAILTMAFKKILKLKNIKEKSLGELINICSNDGQRMFEAAAVGSLLAGGPVVAILGMIYNVIILGPTGFLGSAVFILFYPAMMFASRLTAYFRRKCVAATDERVQKMNEVLTYIKFIKMYAWVKAFSQSVQKIREEERRILEKAGYFQGITVGVAPIVVVIASVVTFSVHMTLGFDLTAAQAFTVVTVFNSMTFALKVTPFSVKSLSEASVAVDRFKSLFLMEEVHMIKNKPASPHIKIEMKNATLAWDSSHSSIQNSPKLTPKMKKDKRASRGKKEKVRQLQRTEHQAVLAEQKGHLLLDSDERPSPEEEEGKHIHLGHLRLQRTLHSIDLEIQEGKLVGICGSVGSGKTSLISAILGQMTLLEGSIAISGTFAYVAQQAWILNATLRDNILFGKEYDEERYNSVLNSCCLRPDLAILPSSDLTEIGERGANLSGGQRQRISLARALYSDRSIYILDDPLSALDAHVGNHIFNSAIRKHLKSKTVLFVTHQLQYLVDCDEVIFMKEGCITERGTHEELMNLNGDYATIFNNLLLGETPPVEINSKKETSGSQKKSQDKGPKTGSVKKEKAVKPEEGQLVQLEEKGQGSVPWSVYGVYIQAAGGPLAFLVIMALFMLNVGSTAFSTWWLSYWIKQGSGNTTVTRGNETSVSDSMKDNPHMQYYASIYALSMAVMLILKAIRGVVFVKGTLRASSRLHDELFRRILRSPMKFFDTTPTGRILNRFSKDMDEVDVRLPFQAEMFIQNVILVFFCVGMIAGVFPWFLVAVGPLVILFSVLHIVSRVLIRELKRLDNITQSPFLSHITSSIQGLATIHAYNKGQEFLHRYQELLDDNQAPFFLFTCAMRWLAVRLDLISIALITTTGLMIVLMHGQIPPAYAGLAISYAVQLTGLFQFTVRLASETEARFTSVERINHYIKTLSLEAPARIKNKAPSPDWPQEGEVTFENAEMRYRENLPLVLKKVSFTIKPKEKIGIVGRTGSGKSSLGMALFRLVELSGGCIKIDGVRISDIGLADLRSKLSIIPQEPVLFSGTVRSNLDPFNQYTEDQIWDALERTHMKECIAQLPLKLESEVMENGDNFSVGERQLLCIARALLRHCKILILDEATAAMDTETDLLIQETIREAFADCTMLTIAHRLHTVLGSDRIMVLAQGQVVEFDTPSVLLSNDSSRFYAMFAAAENKVAVKG

SEQ ID NO: 882 - protein, 382 aa, Homo sapiens
MGDWSALGKLLDKVQAYSTAGGKVWLSVLFIFRILLLGTAVESAWGDEQSAFRCNTQQPGCENVCYDKSFPISHVRFWVLQIIFVSVPTLLYLAHVFYVMRKEEKLNKKEEELKVAQTDGVNVDMHLKQIEIKKFKYGIEEHGKVKMRGGLLRTYIISILFKSIFEVAFLLIQWYIYGFSLSAVYTCKRDPCPHQVDCFLSRPTEKTIFIIFMLVVSLVSLALNIIELFYVFFKGVKDRVKGKSDPYHATSGALSPAKDCGSQKYAYFNGCSSPTAPLSPMSPPGYKLVTGDRNNSSCRNYNKQASEQNWANYSAEQNRMGQAGSTISNSHAQPFDFPDDNQNSKKLAAGHELQPLAIVDQRPSSRASSRASSRPRPDDLEI

SEQ ID NO: 883 - protein, 265 aa, Homo sapiens
MKKEVCSVAFLKAVFAEFLATLIFVFFGLGSALKWPSALPTILQIALAFGLAIGTLAQALGPVSGGHINPAITLALLVGNQISLLRAFFYVAAQLVGAIAGAGILYGVAPLNARGNLAVNALNNNTTQGQAMVVELILTFQLALCIFASTDSRRTSPVGSPALSIGLSVTLGHLVGIYFTGCSMNPARSFGPAVVMNRFSPAHWVFWVGPIVGAVLAAILYFYLLFPNSLSLSERVAIIKGTYEPDEDWEEQREERKKTMELTTR

SEQ ID NO: 884 - protein, 309 aa, Homo sapiens
MVGFKATDVPPTATVKFLGAGTAACIADLITFPLDTAKVRLQIQGESQGPVRATASAQYRGVMGTILTMVRTEGPRSLYNGLVAGLQRQMSFASVRIGLYDSVKQFYTKGSEHASIGSRLLAGSTTGALAVAVAQPTDVVKVRFQAQARAGGGRRYQSTVNAYKTIAREEGFRGLWKGTSPNVARNAIVNCAELVTYDLIKDALLKANLMTDDLPCHFTSAFGAGFCTTVIASPVDVVKTRYMNSALGQYSSAGHCALTMLQKEGPRAFYKGFMPSFLRLGSWNVVMFVTYEQLKRALMAACTSREAPF

SEQ ID NO: 885 - protein, 640 aa, Homo sapiens
MHVKKYLLKGLHRLQKGPGYTYKELLVWYCDNTNTHGPKRIICEGPKKKAMWFLLTLLFAALVCWQWGIFIRTYLSWEVSVSLSVGFKTMDFPAVTICNASPFKYSKIKHLLKDLDELMEAVLERILAPELSHANATRNLNFSIWNHTPLVLIDERNPHHPMVLDLFGDNHNGLTSSSASEKICNAHGCKMAMRLCSLNRTQCTFRNFTSATQALTEWYILQATNIFAQVPQQELVEMSYPGEQMILACLFGAEPCNYRNFTSIFYPHYGNCYIFNWGMTEKALPSANPGTEFGLKLILDIGQEDYVPFLASTGGVRLMLHEQRSYPFIRDEGIYAMSGTETSIGVLVDKLQRMGEPYSPCTVNGSEVPVQNFYSDYNTTYSIQACLRSCFQDHMIRNCNCGHYLYPLPRGEKYCNNRDFPDWAHCYSDLQMSVAQRETCIGMCKESCNDTQYKMTISMADWPSEASEDWIFHVLSQERDQSTNITLSRKGIVKLNIYFQEFNYRTIEESAANNIVWLLSNLGGQFGFWMGGSVLCLIEFGEIIIDFVWITIIKLVALAKSLRQRRAQASYAGPPPTVAELVEAHTNFGFQPDTAPRSPNTGPYPSEQALPIPGTPPPNYDSLRLQPLDVIESDSEGDAI

SEQ ID NO: 886 - protein, 339 aa, Homo sapiens
MESRKDITNQEELWKMKPRRNLEEDDYLHKDTGETSMLKRPVLLHLHQTAHADEFDCPSELQHTQELFPQWHLPIKIAAIIASLTFLYTLLREVIHPLATSHQQYFYKIPILVINKVLPMVSITLLALVYLPGVIAAIVQLHNGTKYKKFPHWLDKWMLTRKQFGLLSFFFAVLHAIYSLSYPMRRSYRYKLLNWAYQQVQQNKEDAWIEHDVWRMEIYVSLGIVGLAILALLAVTSIPSVSDSLTWREFHYIQSKLGIVSLLLGTIHALIFAWNKWIDIKQFVWYTPPTFMIAVFLPIVVLIFKSILFLPCLRKKILKIRHGWEDVTKINKTEICSQL

SEQ ID NO: 887 - protein, 440 aa, Homo sapiens
MNYSLHLAFVCLSLFTERMCIQGSQFNVEVGRSDKLSLPGFENLTAGYNKFLRPNFGGEPVQIALTLDIASISSISESNMDYTATIYLRQRWMDQRLVFEGNKSFTLDARLVEFLWVPDTYIVESKKSFLHEVTVGNRLIRLFSNGTVLYALRITTTVACNMDLSKYPMDTQTCKLQLESWGYDGNDVEFTWLRGNDSVRGLEHLRLAQYTIERYFTLVTRSQQETGNYTRLVLQFELRRNVLYFILETYVPSTFLVVLSWVSFWISLDSVPARTCIGVTTVLSMTTLMIGSRTSLPNTNCFIKAIDVYLGICFSFVFGALLEYAVAHYSSLQQMAAKDRGTTKEVEEVSITNIINSSISSFKRKISFASIEISSDNVDYSDLTMKTSDKFKFVFREKMGRIVDYFTIQNPSNVDHYSKLLFPLIFMLANVFYWAYYMYF

SEQ ID NO: 888 - protein, 896 aa, Homo sapiens
MAAAGPRRSVRGAVCLHLLLTLVIFSRDGEACKKVILNVPSKLEADKIIGRVNLEECFRSADLIRSSDPDFRVLNDGSVYTARAVALSDKKRSFTIWLSDKRKQTQKEVTVLLEHQKKVSKTRHTRETVLRRAKRRWAPIPCSMQENSLGPFPLFLQQVESDAAQNYTVFYSISGRGVDKEPLNLFYIERDTGNLFCTRPVDREEYDVFDLIAYASTADGYSADLPLPLPIRVEDENDNHPVFTEAIYNFEVLESSRPGTTVGVVCATDRDEPDTMHTRLKYSILQQTPRSPGLFSVHPSTGVITTVSHYLDREVVDKYSLIMKVQDMDGQFFGLIGTSTCIITVTDSNDNAPTFRQNAYEAFVEENAFNVEILRIPIEDKDLINTANWRVNFTILKGNENGHFKISTDKETNEGVLSVVKPLNYEENRQVNLEIGVNNEAPFARDIPRVTALNRALVTVHVRDLDEGPECTPAAQYVRIKENLAVGSKINGYKAYDPENRNGNGLRYKKLHDPKGWITIDEISGSIITSKILDREVETPKNELYNITVLAIDKDDRSCTGTLAVNIEDVNDNPPEILQEYVVICKPKMGYTDILAVDPDEPVHGAPFYFSLPNTSPEISRLWSLTKVNDTAARLSYQKNAGFQEYTIPITVKDRAGQAATKLLRVNLCECTHPTQCRATSRSTGVILGKWAILAILLGIALLFSVLLTLVCGVFGATKGKRFPEDLAQQNLIISNTEAPGDDRVCSANGFMTQTTNNSSQGFCGTMGSGMKNGGQETIEMMKGGNQTLESCRGAGHHHTLDSCRGGHTEVDNCRYTYSEWHSFTQPRLGEKLHRCNQNEDRMPSQDYVLTYNYEGRGSPAGSVGCCSEKQEEDGLDFLNNLEPKFITLAEACTKR

SEQ ID NO: 889 - protein, 839 aa, Homo sapiens
MAAAGPRRSVRGAVCLHLLLTLVIFSRDGEACKKVILNVPSKLEADKIIGRVNLEECFRSADLIRSSDPDFRVLNDGSVYTARAVALSDKKRSFTIWLSDKRKQTQKEVTVLLEHQKKVSKTRHTRETVLRRAKRRWAPIPCSMQENSLGPFPLFLQQVESDAAQNYTVFYSISGRGVDKEPLNLFYIERDTGNLFCTRPVDREEYDVFDLIAYASTADGYSADLPLPLPIRVEDENDNHPVFTEAIYNFEVLESSRPGTTVGVVCATDRDEPDTMHTRLKYSILQQTPRSPGLFSVHPSTGVITTVSHYLDREVVDKYSLIMKVQDMDGQFFGLIGTSTCIITVTDSNDNAPTFRQNAYEAFVEENAFNVEILRIPIEDKDLINTANWRVNFTILKGNENGHFKISTDKETNEGVLSVVKPLNYEENRQVNLEIGVNNEAPFARDIPRVTALNRALVTVHVRDLDEGPECTPAAQYVRIKENLAVGSKINGYKAYDPENRNGNGLRYKKLHDPKGWITIDEISGSIITSKILDREVETPKNELYNITVLAIDKDDRSCTGTLAVNIEDVNDNPPEILQEYVVICKPKMGYTDILAVDPDEPVHGAPFYFSLPNTSPEISRLWSLTKVNDTAARLSYQKNAGFQEYTIPITVKDRAGQAATKLLRVNLCECTHPTQCRATSRSTGVILGKWAILAILLGIALLFSVLLTLVCGVFGATKGKRFPEDLAQQNLIISNTEAPGDDRVCSANGFMTQTTNNSSQGFCGTMGSGMKNGGQETIEMMKGGNQTLESCRGAGHHHTLDSCRGGHTEVDNCRYTYSEWHSFTQPRLGEESIRGHTG

SEQ ID NO: 890 - protein, 553 aa, Homo sapiens [sequence omitted]

SEQ ID NO: 891 - protein, 727 aa, Homo sapiens
MAFQKAVKGTILVGGGALATVLGLSQFAHYRRKQMNLAYVKAADCISEPVNREPPSREAQLLTLQNTSEFDILVIGGGATGSGCALDAVTRGLKTALVERDDFSSGTSSRSTKLIHGGVRYLQKAIMKLDIEQYRMVKEALHERANLLEIAPHLSAPLPIMLPVYKWWQLPYYWVGIKLYDLVAGSNCLKSSYVLSKSRALEHFPMLQKDKLVGAIVYYDGQHNDARMNLAIALTAARYGAATANYMEVVSLLKKTDPQTGKVHVSGARCKDVLTGQEFDVRAKCVINATGPFTDSVRKMDDKDAAAICQPSAGVHIVMPGYYSPESMGLLDPATSDGRVIFFLPWQKMTIAGTTDTPTDVTHHPIPSEEDINFILNEVRNYLSCDVEVRRGDVLAAWSGIRPLVTDPKSADTQSISRNHVVDISESGLITIAGGKWTTYRSMAEDTINAAVKTHNLKAGPSRTVGLFLQGGKDWSPTLYIRLVQDYGLESEVAQHLAATYGDKAFEVAKMASVTGKRWPIVGVHLVSEFPYIEAEVKYGIKEYACTAVDMISRRTRLAFLNVQAAEEALPRIVELMGRELNWDDYKKQEQLETARKFLYYEMGYKSRSEQLTDRSEISLLPSDIDRYKKRFHKFDADQKGFITIVDVQRVLESINVQMDENTLHEILNEVDLNKNGQVELNEFLQLMSAIQKGRVSGSRLAILMKTAEENLDRRVPIPVDRSCGGL

SEQ ID NO: 892 - protein, 388 aa, Homo sapiens
MRARRGLLRLPRRSLLAALFFFSLSSSLLYFVYVAPGIVNTYLFMMQAQGILIRDNVRTIGAQVYEQVLRSAYAKRNSSVNDSDYPLDLNHSETFLQTTTFLPEDFTYFANHTCPERLPSMKGPIDINMSEIGMDYIHELFSKDPTIKLGGHWKPSDCMPRWKVAILIPFRNRHEHLPVLFRHLLPMLQRQRLQFAFYVVEQVGTQPFNRAMLFNVGFQEAMKDLDWDCLIFHDVDHIPESDRNYYGCGQMPRHFATKLDKYMYLLPYTEFFGGVSGLTVEQFRKINGFPNAFWGWGGEDDDLWNRVQNAGYSVSRPEGDTGKYKSIPHHHRGEVQFLGRYALLRKSKERQGLDGLNNLNYFANITYDALYKNITVNLTPELAQVNEY

SEQ ID NO: 893 - protein, 222 aa, Homo sapiens
MAGKPKLHYFNGRGRMEPIRWLLAAAGVEFEEKFIGSAEDLGKLRNDGSLMFQQVPMVEIDGIKLVQTRAILNYIASKYNLYGKDIKERALIDMYTEGMADLNEMILLLPLCRPEEKDAKIALIKEKTKSRYFPAFEKVLQSHGQDYLVGNKLSRADISLVELLYYVEELDSSLISNFPLLKALKTRISNLPTVKKFLQPGSPRKPPADAKALEEARKIFRF

SEQ ID NO: 894 - protein, 667 aa, Homo sapiens
MSSQPAGNQTSPGATEDYSYGSWYIDEPQGGEELQPEGEVPSCHTSIPPGLYHACLASLSILVLLLLAMLVRRRQLWPDCVRGRPGLPSPVDFLAGDRPRAVPAAVFMVLLSSLCLLLPDEDALPFLTLASAPSQDGKTEAPRGAWKILGLFYYAALYYPLAACATAGHTAAHLLGSTLSWAHLGVQVWQRAECPQVPKIYKYYSLLASLPLLLGLGFLSLWYPVQLVRSFSRRTGAGSKGLQSSYSEEYLRNLLCRKKLGSSYHTSKHGFLSWARVCLRHCIYTPQPGFHLPLKLVLSATLTGTAIYQVALLLLVGVVPTIQKVRAGVTTDVSYLLASFGIVLSEDKQEVVELVKHHLWALEVCYISALVLSCLLTFLVLMRSLVTHRTNLRALHRGAALDLSPLHRSPHPSRQAIFCWMSFSAYQTAFICLGLLVQQIIFFLGTTALAFLVLMPVLHGRNLLLFRSLESSWPFWLTLALAVILQNMAAHWVFLETHDGHPQLTNRRVLYAATFLLFPLNVLVGAMVATWRVLLSALYNAIHLGQMDLSLLPPRAATLDPGYYTYRNFLKIEVSQSHPAMTAFCSLLLQAQSLLPRTMAAPQDSLRPGEEDEGMQLLQTKDSMAKGARPGASRGRARWGLAYTLLHNPTLQVFRKTALLGANGAQP

SEQ ID NO: 895 - protein, 232 aa, Homo sapiens; identical to SEQ ID NO: 844

SEQ ID NO: 896 - protein, 129 aa, Homo sapiens
MSISRAVLGEKEGGLGSVAPCQPALREDRVSHARMAGHVSVLVSHFPPSVTYLGIPQGLLECDCPLPSCLGYKSWPYVPAVRGSGNPTQPPVLGWSVSIHPLVVIEAALPVLGEDIWATRAPLAPSRRK

SEQ ID NO: 897 - protein, 198 aa, Homo sapiens
MAVDKSNPTSKHKSGAVASLLSKAERATELAAEGQLTLQQFAQSTEMLKRVVQEHLPLMSEAGAGLPDMEAVAGAEALNGQSDFPYLGAFPINPGLFIMTPAGVFLAESALHMAGLAEYPMQGELPLPSAPARRSGNAAALCAPCRRRINCEQCSSCRNRKTGHQICKFRKCEELKKKPSAALEKVMLPTGAAFRWFQ

SEQ ID NO: 898 - protein, 317 aa, Homo sapiens
MFIPYLYALYLIWAVFEMFTPILGRSGSEIPPDVVLASILAGCTMILSSYFINFIYLAKSTKKTMLTLTLVCAITFLLVCSGTFFPYSSNPANPKPKRVFLQHMTRTFHDLEGNAVKRDSGIWINGFDYTGISHITPHIPAINDSIRAHCEENAPLCGFPWYLPVHFLIRKNWYLPAPEVSPRNPPHFRLISKEQTPWDSIKLTFEATGPSHMSFYVRAHKGSTLSQWSLGNGTPVTSKGGDYFVFYSHGLQASAWQFWIEVQVSEEHPEGMVTVAIAAHYLSGEDKRSPQLDALKEKFPDWTFPSAWVCTYDLFVF

SEQ ID NO: 899 - protein, 265 aa, Homo sapiens; identical to SEQ ID NO: 803

SEQ ID NO: 900 - protein, 248 aa, Homo sapiens
MFLAKALLEGADRGLGEALGGLFGGGGQRREGGGRNIGGIVGGIVNFISEAAAAQYTPEPPPTQQHFTSVEASESEEVRRFRQQFTQLAGPDMEVGATDLMNILNKVLSKHKDLKTDGFSLDTCRSIVSVMDSDTTGKLGFEEFKYLWNNIKKWQCVYKQYDRDHSGSLGSSQLRGALQAAGFQLNEQLYQMIVRRYANEDGDMDFNNFISCLVRLDAMFRAFKSLDRDRDGLIQVSIKEWLQLTMYS

SEQ ID NO: 901 - protein, 428 aa, Homo sapiens
MGPPPGAGVSCRGGCGFSRLLAWCFLLALSPQAPGSRGAEAVWTAYLNVSWRVPHTGVNRTVWELSEEGVYGQDSPLEPVAGVLVPPDGPGALNACNPHTNFTVPTVWGSTVQVSWLALIQRGGGCTFADKIHLAYERGASGAVIFNFPGTRNEVIPMSHPGAVDIVAIMIGNLKGTKILQSIQRGIQVTMVIEVGKKHGPWVNHYSIFFVSVSFFIITAATVGYFIFYSARRLRNARAQSRKQRQLKADAKKAIGRLQLRTLKQGDKEIGPDGDSCAVCIELYKPNDLVRILTCNHIFHKTCVDPWLLEHRTCPMCKCDILKALGIEVDVEDGSVSLQVPVSNEISNSASSHEEDNRSETASSGYASVQGTDEPPLEEHVQSTNESLQLVNHEANSVAVDVIPHVDNPTFEEDETPNQETAVREIKS

SEQ ID NO: 902 - protein, 527 aa, Homo sapiens
MEMQQNIENYRATAGVEALQLVDREAKPHMESYNAGVKHYEADDFEMAIRHFEQALREYFVEDTECRTLCEGPQRFEEYEYLGYKAGLYEAIADHYMQVLVCQHECVRELATRPGRLSPIENFLPLHYDYLQFAYYRVGEYVKALECAKAYLLCHPDDEDVLDNVDYYESLLDDSIDPASIEAREDLTMFVKRHKLESELIKSAAEGLGFSYTEPNYWIRYGGRQDENRVPSGVNVEGAEVHGFSMGKKLSPKIDRDLREGGPLLYENITFVYNSEQLNGTQRVLLDNVLSEEQCRELHSVASGIMLVGDGYRGKTSPHTPNEKFEGATVLKALKSGYEGRVPLKSARLFYDISEKARRIVESYFMLNSTLYFSYTHMVCRTALSGQQDRRNDLSHPIHADNCLLDPEANECWKEPPAYTFRDYSALLYMNDDFEGGEFIFTEMDAKTVTASIKPKCGRMISFSSGGENPHGVKAVTKGKRCAVALWFTLDPLYRELERIQADEVIAILDQEQQGKHELNINPKDEL

SEQ ID NO: 903 - protein, 193 aa, Homo sapiens
MNIFMTFVINVLRKNLFHGFMVITQAPVRILPSQERIRTPCHSPAILLSSCRVLSGNNCIMAALTSVIKRNLLFFRLDLFPLWLIFLYIVKMGDFPSAPTHLNTAAICTCLLPIPLGTHSDLLSVSCSWFHLFEKGPPLSYKHLVRQVHPLMNADTAAGGFVYTCKDKLRGLLFGEVKEDGNGCFICMSLEQC

SEQ ID NO: 904 - protein, 294 aa, Homo sapiens
MSRSRHLGKIRKRLEDVKSQWVRPARADFSDNESARLATDALLDGGSEAYWRVLSQEGEVDFLSSVEAQYIQAQAREPPCPPDTLGGAEAGPKGLDSSSLQSGTYFPVASEGSEPALLHSWASAEKPYLKEKSSATVYFQTVKHNNIRDLVRRCITRTSQNISIRSVEGEIYCAKSGRKFTGQIREKFIISDWRFVLSGSYSFTWLCGHVHRNILSKFTGQAVELFDEEFRHLYASSKPVMGLKSPRLVAPVPPGAAPANGRLSSSSGSASDRTSSNPFSGRSAGSHPGTRTDG

SEQ ID NO: 905 - protein, 53 aa, Homo sapiens
MKRESTLKFITSLLPTMKSTTCIWYQAGRQMRREEEEEEEKALGSSAKIKIKK

SEQ ID NO: 906 - protein, 531 aa, Homo sapiens
  MISC_FEATURE (327)..(327): "Xaa" = any amino acid
MADVLSVLRQYNIQKKEIVVKGDEVIFGEFSWPKNVKTNYVVWGTGKEGQPREYYTLDSILFLLNNVHLSHPVYVRRAATENIPVVRRPDRKDLLGYLNGEASTSASIDRSAPLEIGLQRSTQVKRAADEVLAEAKKPRIEDEECVRLDKERLAARLEGHKEGIVQTEQIRSLSEAMSVEKIAAIKAKIMAKKRSTIKTDLDDDITALKQRSFVDAEVDVTRDIVSRERVWRTRTTILQSTGKNFSKNIFAILQSVKAREEGRAPEQRPAPNAAPVDPTLRTKQPIPAAYNRYDQERFKGKEETEGFKIDTMGTYHGMTLKSVTEGXSARKTQTPAAQPVPRPVSQARPPPNQKKGSRTPIIIIPAATTSLITMLNAKDLLQDLKFVPSDEKKKQGCQRENETLIQRRKDQMQPGGTAISVTVPYRVVDQPLKLMPQDWDRVVAVFVQGPAWQFKGWPWLLPDGSPVDIFAKIKAFHLKYDEVRLDPNVQKWDVTVLELSYHKRHLDRPVFLRFWETLDRYMVKHKSHLRF

SEQ ID NO: 907 - protein, 331 aa, Homo sapiens
MENPSPAAALGKALCALLLATLGAAGQPLGGESICSARAPAKYSITFTGKWSQTAFPKQYPLFRPPAQWSSLLGAAHSSDYSMWRKNQYVSNGLRDFAERGEAWALMKEIEAAGEALQSVHAVFSAPAVPSGTGQTSAELEVQRRHSLVSFVVRIVPSPDWFVGVDSLDLCDGDRWREQAALDLYPYDAGTDSGFTFSSPNFATIPQDTVTEITSSSPSHPANSFYYPRLKALPPIARVTLVRLRQSPRAFIPPAPVLPSRDNEIVDSASVPETPLDCEVSLWSSWGLCGGHCGRLGTKSRTRYVRVQPANNGSPCPELEEEAECVPDNCV

SEQ ID NO: 908 - protein, 304 aa, Homo sapiens
MKRAHPEYSSSDSELDETIEVEKESADENGNLSSALGSMSPTTSSQILARKRRRGIIEKRRRDRINNSLSELRRLVPSAFEKQGSAKLEKAEILQMTVDHLKMLHTAGGKGYFDAHALAMDYRSLGFRECLAEVARYLSIIEGLDASDPLRVRLVSHLNNYASQREAASGAHAGLGHIPWGTVFGHHPHIAHPLLLPQNGHGNAGTTASPTEPHHQGRLGSAHPEAPALRAPPSGSFGPVLPVVTSASKLSLPLLSSVASLSAFPFSFGSFHLLSPNALSPSAPTQAANLGKPYRPWGTEIGAF

SEQ ID NO: 909 - protein, 104 aa, Homo sapiens
MKLAALLGLCVALSCSSARAFLVGSAKPVAQPVAALESAAEAGAGTLANPLGTLNPLKLLLSSLGIPVNHLIEGSQKCVAELGPQAVGAVKALKALLGALTVFG

SEQ ID NO: 910 - protein, 350 aa, Homo sapiens
MPSLLEYLSYNCNFMGILAGPLCSYKDYITFIEGRSYHITQSGENGKEETQYERTEPSPNTAVVQKLLVCGLSLLFHLTICTTLPVEYNIDEHFQATASWPTKIIYLYISLLAARPKYYFAWTLADAINNAAGFGFRGYDENGAARWDLISNLRIQQIEMSTSFKMFLDNWNIQTALWLKRVCYERTSFSPTIQTFILSAIWHGVYPGYYLTFLTGVLMTLAARAMRNNFRHYFIEPSQLKLFYDVITWIVTQVAISYTVVPFVLLSIKPSLTFYSSWYYCLHILGILVLLLLPVKKTQRRKNTHENIQLSQSKKFDEGENSLGQNSFSTTNNVCNQNQEIASRHSSLKQ

SEQ ID NO: 911 - protein, 224 aa, Homo sapiens
MRVSGVLRLLALIFAIVTTWMFIRSYMSFSMKTIRLPRWLAASPTKEIQVKKYKCGLIKPCPANYFAFKICSGAANVVGPTMCFEDRMIMSPVKNNVGRGLNIALVNGTTGAVLGQKAFDMYSGDVMHLVKFLKEIPGGALVLVASYDDPGTKMNDESRKLFSDLGSSYAKQLGFRDSWVFIGAKDLRGKSPFEQFLKNSPDTNKYEGWPELLEMEGCMPPKPF

SEQ ID NO: 912 - protein, 484 aa, Homo sapiens
MAGPWTFTLLCGLLAATLIQATLSPTAVLILGPKVIKEKLTQELKDHNATSILQQLPLLSAMREKPAGGIPVLGSLVNTVLKHVIWLKVITANILQLQVKPSANDQELLVKIPLDMVAGFNTPLVKTIVEFHMTTEAQATIRMDTSASGPTRLVLSDCATSHGSLRIQLLHKLSFLVNALAKQVMNLLVPSLPNLVKNQLCPVIEASFNGMYADLLQLVKVPISLSIDRLEFDLLYPAIKGDTIQLYLGAKLLDSQGKVTKWFNNSAASLTMPTLDNIPFSLIVSQDVVKAAVAAVLSPEEFMVLLDSVLPESAHRLKSSIGLINEKAADKLGSTQIVKILTQDTPEFFIDQGHAKVAQLIVLEVFPSSEALRPLFTLGIEASSEAQFYTKGDQLILNLNNISSDRIQLMNSGIGWFQPDVLKNIITEIIHSILLPNQNGKLRSGVPVSLVKALGFEAAESSLSKDALVLTPASLWKPTSPVSQ

SEQ ID NO: 913 - protein, 256 aa, Homo sapiens
MFQTGGLIVFYGLLAQTMAQFGGLPVPLDQTLPLNVNPALPLSPTGLAGSLTNALSNGLLSGGLLGILENLPLLDILKPGGGTSGGLLGGLLGKVTSVIPGLNNIIDIKVTDPQLLELGLVQSPDGHRLYVTIPLGIKLQVNTPLVGASLLRLAVKLDITAEILAVRDKQERIHLVLGDCTHSPGSLQISLLDGLGPLPIQGLLDSLTGILNKVLPELVQGNVCPLVNEVLRGLDITLVHDIVNMLIHGLQFVIKV

SEQ ID NO: 914 - protein, 256 aa, Homo sapiens; identical to SEQ ID NO: 913

SEQ ID NO: 915 - protein, 294 aa, Homo sapiens; identical to SEQ ID NO: 904

SEQ ID NO: 916 - protein, 457 aa, Homo sapiens
MTTDEGAKNNEESPTATVAEQGEDITSKKDRGVLKIVKRVGNGEETPMIGDKVYVHYKGKLSNGKKFDSSHDRNEPFVFSLGKGQVIKAWDIGVATMKKGEICHLLCKPEYAYGSAGSLPKIPSNATLFFEIELLDFKGEDLFEDGGIIRRTKRKGEGYSNPNEGATVEIHLEGRCGGRMFDCRDVAFTVGEGEDHDIPIGIDKALEKMQREEQCILYLGPRYGFGEAGKPKFGIEPNAELIYEVTLKSFEKAKESWEMDTKEKLEQAAIVKEKGTVYFKGGKYMQAVIQYGKIVSWLEMEYGLSEKESKASESFLLAAFLNLAMCYLKLREYTKAVECCDKALGLDSANEKGLYRRGEAQLLMNEFESAKGDFEKVLEVNPQNKAARLQISMCQKKAKEHNERDRRIYANMFKKFAEQDAKEEANKAMGKKTSEGVTNEKGTDSQAMEEEKPEGHV

SEQ ID NO: 917 - protein, 118 aa, Homo sapiens
MSGGSSCSQTPSRAIPATRRVVLGDGVQLPPGDYSTTPGGTLFSTTPGGTRIIYDRKFLMECRNSPVTKTPPRDLPTIPGVTSPSSDEPPMEASQSHLRNSPEDKRAGGEESQFEMDI

SEQ ID NO: 918 - protein, 3063 aa, Homo sapiens
MRSRLPPALAALGAALLLSSIEAEVDPPSDLNFKIIDENTVHMSWAKPVDPIVGYRITVDPTTDGPTKEFTLSASTTETLLSELVPETEYVVTITSYDEVEESVPVIGQLTIQTGSSTKPVEKKPGKTEIQKCSVSAWTDLVFLVDGSWSVGRNNFKYILDFIAALVSAFDIGEEKTRVGVVQYSSDTRTEFNLNQYYQRDELLAAIKKIPYKGGNTMTGDAIDYLVKNTFTESAGARVGFPKVAIIITDGKSQDEVEIPARELRNVGVEVFSLGIKAADAKELKQIASTPSLNHVFNVANFDAIVDIQNEIISQVCSGVDEQLGELVSGEEVVEPPSNLIAMEVSSKYVKLNWNPSPSPVTGYKVILTPMTAGSRQHALSVGPQTTTLSVRDLSADTEYQISVSAMKGMTSSEPISIMEKTQPMKVQVECSRGVDIKADIVFLVDGSYSIGIANFVKVRAFLEVLVKSFEISPNRVQISLVQYSRDPHTEFTLKKFTKVEDIIEAINTFPYRGGSTNTGKAMTYVREKIFVPSKGSRSNVPKVMILITDGKSSDAFRDPAIKLRNSDVEIFAVGVKDAVRSELEAIASPPAETHVFTVEDFDAFQRISFELTQSICLRIEQELAAIKKKAYVPPKDLSFSEVTSYGFKTNWSPAGENVFSYHITYKEAAGDDEVTVVEPASSTSVVLSSLKPETLYLVNVTAEYEDGFSIPLAGEETTEEVKGAPRNLKVTDETTDSFKITWTQAPGRVLRYRIIYRPVAGGESREVTTPPNQRRRTLENLIPDTKYEVSVIPEYFSGPGTPLTGNAATEEVRGNPRDLRVSDPTTSTMKLSWSGAPGKVKQYLVTYTPVAGGETQEVTVRGDTTNTVLQGLKEGTQYALSVTALYASGAGDALFGEGTTLEERGSPQDLVTKDITDTSIGAYWTSAPGMVRGYRVSWKSLYDDVDTGEKNLPEDAIHTMIENLQPETKYRISVFATYSSGEGEPLTGDATTELSQDSKTLKVDEETENTMRVTWKPAPGKVVNYRVVYRPHGRGKQMVAKVPPTVTSTVLKRLQPQTTYDITVLPIYKMGEGKLRQGSGTTASRFKSPRNLKTSDPTMSSFRVTWEPAPGEVKGYKVTFHPTGDDRRLGELVVGPYDNTVVLEELRAGTTYKVNVFGMFDGGESSPLVGQEMTTLSDTTVMPILSSGMECLTRAEADIVLLVDGSWSIGRANFRTVRSFISRIVEVFDIGPKRVQIALAQYSGDPRTEWQLNAHRDKKSLLQAVANLPYKGGNTLTGMALNFIRQQNFRTQAGMRPRARKIGVLITDGKSQDDVEAPSKKLKDEGVELFAIGIKNADEVELKMIATDPDDTHAYNVADFESLSRIVDDLTINLCNSVKGPGDLEAPSNLVISERTHRSFRVSWTPPSDSVDRYKVEYYPVSGGKRQEFYVSRMETSTVLKDLKPETEYVVNVYSVVEDEYSEPLKGTEKTLPVPVVSLNIYDVGPTTMHVQWQPVGGATGYILSYKPVKDTEPTRPKEVRLGPTVNDMQLTDLVPNTEYAVTVQAVLHDLTSEPVTVREVTLPLPRPQDLKLRDVTHSTMNVFWEPVPGKVRKYIVRYKTPEEDVKEVEVDRSETSTSLKDLFSQTLYTVSVSAVHDEGESPPVTAQETTRPVPAPTNLKITEVTSEGFRGTWDHGASDVSLYRITWAPFGSSDKMETILNGDENTLVFENLNPNTIYEVSITAIYPDESESDDLIGSERTLPILTTQAPKSGPRNLQVYNATSNSLTVKWDPASGRVQKYRITYQPSTGEGNEQTTTIGGRQNSVVLQKLKPDTPYTITVSSLYPDGEGGRMTGRGKTKPLNTVRNLRVYDPSTSTLNVRWDHAEGNPRQYKLFYAPAAGGPEELVPIPGNTNYAILRNLQPDTSYTVTVVPVYTEGDGGRTSDTGRTLMRGLARNVQVYNPTPNSLDVRWDPAPGPVLQYRVVYSPVDGTRPSESIVVPGNTRMVHLERLIPDTLYSVNLVALYSDGEGNPSPAQGRTLPRSGPRNLRVFGETTNSLSVAWDHADGPVQQYRIIYSPTVGDPIDEYTTVPGRRNNVILQPLQPDTPYKITVIAVYEDGDGGHLTGNGRTVGLLPPQNIHISDEWYTRFRVSWDPSPSPVLGYKIVYKPVGSNEPMEAFVGEMTSYTLHNLNPSTTYDVNVYAQYDSGLSVPLTDQGTTLYLNVTDLKTYQIGWDTFCVKWSPHRAATSYRLKLSPADGTRGQEITVRGSETSHCFTGLSPDTDYGVTVFVQTPNLEGPGVSVKEHTTVKPTEAPTEPPTPPPPPTIPPARDVCKGAKADIVFLTDASWSIGDDNFNKVVKFIFNTVGGFDEISPAGIQVSFVQYSDEVKSEFKLNTYNDKALALGALQNIRYRGGNTRTGKALTFIKEKVLTWESGMRKNVPKVLVVVTDGRSQDEVKKAALVIQQSGFSVFVVGVADVDYNELANIASKPSERHVFIVDDFESFEKIEDNLITFVCETATSSCPLIYLDGYTSPGFKMLEAYNLTEKNFASVQGVSLESGSFPSYSAYRIQKNAFVNQPTADLHPNGLPPSYTIILLFRLLPETPSDPFAIWQITDRDYKPQVGVIADPSSKTLSFFNKDTRGEVQTVTFDTEEVKTLFYGSFHKVHIVVTSKSVKIYIDCYEIIEKDIKEAGNITTDGYEILGKLLKGERKSAAFQIQSFDIVCSPVWTSRDRCCDIPSRRDEGKCPAFPNSCTCTQDSVGPPGPPGPAGGPGAKGPRGERGISGAIGPPGPRGDIGPPGPQGPPGPQGPNGLSIPGEQGRQGMKGDAGEPGLPGRTGTPGLPGPPGPMGPPGDRGFTGKDSAMGPRGPPGRPGSPGSPGVTGPSGKPGKPGDHGRPGPSGLKGEKGDRGDIASQNMMRAVARQVCEQLISGQMNRFNQMLNQIPNDYQSSRNQPGPPGPPGPPGSAGARGEPGPGGRPGFPGTPGMQGPPGERGLPGEKGERGTGSSGPRGLPGPPGPQGESRTGPPGSTGSRGPPGPPGRPGNSGIQGPPGPPGYCDSSQCASIPYNGQSYPGSG

SEQ ID NO: 919 - protein, 1899 aa, Homo sapiens
MRSRLPPALAALGAALLLSSIEAEGMECLTRAEADIVLLVDGSWSIGRANFRTVRSFISRIVEVFDIGPKRVQIALAQYSGDPRTEWQLNAHRDKKSLLQAVANLPYKGGNTLTGMALNFIRQQNFRTQAGMRPRARKIGVLITDGKSQDDVEAPSKKLKDEGVELFAIGIKNADEVELKMIATDPDDTHAYNVADFESLSRIVDDLTINLCNSVKGPGDLEAPSNLVISERTHRSFRVSWTPPSDSVDRYKVEYYPVSGGKRQEFYVSRMETSTVLKDLKPETEYVVNVYSVVEDEYSEPLKGTEKTLPVPVVSLNIYDVGPTTMHVQWQPVGGATGYILSYKPVKDTEPTRPKEVRLGPTVNDMQLTDLVPNTEYAVTVQAVLHDLTSEPVTVREVTLPLPRPQDLKLRDVTHSTMNVFWEPVPGKVRKYIVRYKTPEEDVKEVEVDRSETSTSLKDLFSQTLYTVSVSAVHDEGESPPVTAQETTRPVPAPTNLKITEVTSEGFRGTWDHGASDVSLYRITWAPFGSSDKMETILNGDENTLVFENLNPNTIYEVSITAIYPDESESDDLIGSERTLPILTTQAPKSGPRNLQVYNATSNSLTVKWDPASGRVQKYRITYQPSTGEGNEQTTTIGGRQNSVVLQKLKPDTPYTITVSSLYPDGEGGRMTGRGKTKPLNTVRNLRVYDPSTSTLNVRWDHAEGNPRQYKLFYAPAAGGPEELVPIPGNTNYAILRNLQPDTSYTVTVVPVYTEGDGGRTSDTGRTLMRGLARNVQVYNPTPNSLDVRWDPAPGPVLQYRVVYSPVDGTRPSESIVVPGNTRMVHLERLIPDTLYSVNLVALYSDGEGNPSPAQGRTLPRSGPRNLRVFGETTNSLSVAWDHADGPVQQYRIIYSPTVGDPIDEYTTVPGRRNNVILQPLQPDTPYKITVIAVYEDGDGGHLTGNGRTVGLLPPQNIHISDEWYTRFRVSWDPSPSPVLGYKIVYKPVGSNEPMEAFVGEMTSYTLHNLNPSTTYDVNVYAQYDSGLSVPLTDQGTTLYLNVTDLKTYQIGWDTFCVKWSPHRAATSYRLKLSPADGTRGQEITVRGSETSHCFTGLSPDTDYGVTVFVQTPNLEGPGVSVKEHTTVKPTEAPTEPPTPPPPPTIPPARDVCKGAKADIVFLTDASWSIGDDNFNKVVKFIFNTVGGFDEISPAGIQVSFVQYSDEVKSEFKLNTYNDKALALGALQNIRYRGGNTRTGKALTFIKEKVLTWESGMRKNVPKVLVVVTDGRSQDEVKKAALVIQQSGFSVFVVGVADVDYNELANIASKPSERHVFIVDDFESFEKIEDNLITFVCETATSSCPLIYLDGYTSPGFKMLEAYNLTEKNFASVQGVSLESGSFPSYSAYRIQKNAFVNQPTADLHPNGLPPSYTIILLFRLLPETPSDPFAIWQITDRDYKPQVGVIADPSSKTLSFFNKDTRGEVQTVTFDTEEVKTLFYGSFHKVHIVVTSKSVKIYIDCYEIIEKDIKEAGNITTDGYEILGKLLKGERKSAAFQIQSFDIVCSPVWTSRDRCCDIPSRRDEGKCPAFPNSCTCTQDSVGPPGPPGPAGGPGAKGPRGERGISGAIGPPGPRGDIGPPGPQGPPGPQGPNGLSIPGEQGRQGMKGDAGEPGLPGRTGTPGLPGPPGPMGPPGDRGFTGKDSAMGPRGPPGRPGSPGSPGVTGPSGKPGKPGDHGRPGPSGLKGEKGDRGDIASQNMMRAVARQVCEQLISGQMNRFNQMLNQIPNDYQSSRNQPGPPGPPGPPGSAGARGEPGPGGRPGFPGTPGMQGPPGERGLPGEKGERGTGSSGPRGLPGPPGPQGESRTGPPGSTGSRGPPGPPGRPGNSGIQGPPGPPGYCDSSQCASIPYNGQSYPGSG

SEQ ID NO: 920 - protein, 302 aa, Homo sapiens; identical to SEQ ID NO: 877

SEQ ID NO: 921 - protein, 571 aa, Homo sapiens
MTRAGDHNRQRGCCGSLADYLTSAKFLLYLGHSLSTWGDRMWHFAVSVFLVELYGNSLLLTAVYGLVVAGSVLVLGAIIGDWVDKNARLKVAQTSLVVQNVSVILCGIILMMVFLHKHELLTMYHGWVLTSCYILIITIANIANLASTATAITIQRDWIVVVAGEDRSKLANMNATIRRIDQLTNILAPMAVGQIMTFGSPVIGCGFISGWNLVSMCVEYVLLWKVYQKTPALAVKAGLKEEETELKQLNLHKDTEPKPLEGTHLMGVKDSNIHELEHEQEPTCASQMAEPFRTFRDGWVSYYNQPVFLAGMGLAFLYMTVLGFDCITTGYAYTQGLSGSILSILMGASAITGIMGTVAFTWLRRKCGLVRTGLISGLAQLSCLILCVISVFMPGSPLDLSVSPFEDIRSRFIQGESITPTKIPEITTEIYMSNGSNSANIVPETSPESVPIISVSLLFAGVIAARIGLWSFDLTVTQLLQENVIESERGIINGVQNSMNYLLDLLHFIMVILAPNPEAFGLLVLISVSFVAMGHIMYFRFAQNTLGNKLFACGPDAKEVRKENQANTSVV

SEQ ID NO: 922 - protein, 1154 aa, Homo sapiens
MSSNIHANHLSLDASSSSSSSSSSSSSSSSSSSSSSVHEPKMDALIIPVTMEVPCDSRGQRMWWAFLASSMVTFFGGLFIILLWRTLKYLWTVCCHCGGKTKEAQKINNGSSQADGTLKPVDEKEEAVAAEVGWMTSVKDWAGVMISAQTLTGRVLVVLVFALSIGALVIYFIDSSNPIESCQNFYKDFTLQIDMAFNVFFLLYFGLRFIAANDKLWFWLEVNSVVDFFTVPPVFVSVYLNRSWLGLRFLRALRLIQFSEILQFLNILKTSNSIKLVNLLSIFISTWLTAAGFIHLVENSGDPWENFQNNQALTYWECVYLLMVTMSTVGYGDVYAKTTLGRLFMVFFILGGLAMFASYVPEIIELIGNRKKYGGSYSAVSGRKHIVVCGHITLESVSNFLKDFLHKDRDDVNVEIVFLHNISPNLELEALFKRHFTQVEFYQGSVLNPHDLARVKIESADACLILANKYCADPDAEDASNIMRVISIKNYHPKIRIITQMLQYHNKAHLLNIPSWNWKEGDDAICLAELKLGFIAQSCLAQGLSTMLANLFSMRSFIKIEEDTWQKYYLEGVSNEMYTEYLSSAFVGLSFPTVCELCFVKLKLLMIAIEYKSANRESRILINPGNHLKIQEGTLGFFIASDAKEVKRAFFYCKACHDDITDPKRIKKCGCKRLEDEQPSTLSPKKKQRNGGMRNSPNTSPKLMRHDPLLIPGNDQIDNMDSHVKKYDSTGMFHWCAPKEIEKVILTRSEAAMTVLSGHVVVCIFGDVSSALIGLRNLVMPLRASNFHYHELKHIVFVGSIEYLKREWETLHNFPKVSILPGTPLSRADLRAVNINLCDMCVILSANQNNIDDTSLQDKECILASLNIKSMQFDDSIGVLQANSQGFTPPGMDRSSPDNSPVHGMLRQPSITTGVNIPIITELVNDTNVQFLDQDDDDDPDTELYLTQPFACGTAFAVSVLDSLMSATYFNDNILTLIRTLVTGGATPELEALIAEENALRGGYSTPQTLANRDRCRVAQLALLDGPFADLGDGGCYGDLFCKALKTYNMLCFGIYRLRDAHLSTPSQCTKRYVITNPPYEFELVPTDLIFCLMQFDHNAGQSRASLSHSSHSSQSSSKKSSSVHSIPSTANRQNRPKSRESRDKQKYVQEERL

SEQ ID NO: 923 - protein, 690 aa, Homo sapiens
MAPWPELGDAQPNPDKYLEGAAGQQPTAPDKSKETNKTDNTEAPVTKIELLPSYSTATLIDEPTEVDDPWNLPTLQDSGIKWSERDTKGKILCFFQGIGRLILLLGFLYFFVCSLDILSSAFQLVGGKMAGQFFSNSSIMSNPLLGLVIGVLVTVLVQSSSTSTSIVVSMVSSSLLTVRAAIPIIMGANIGTSITNTIVALMQVGDRSEFRRAFAGATVHDFFNWLSVLVLLPVEVATHYLEIITQLIVESFHFKNGEDAPDLLKVITKPFTKLIVQLDKKVISQIAMNDEKAKNKSLVKIWCKTFTNKTQINVTVPSTANCTSPSLCWTDGIQNWTMKNVTYKENIAKCQHIFVNFHLPDLAVGTILLILSLLVLCGCLIMIVKILGSVLKGQVATVIKKTINTDFPFPFAWLTGYLAILVGAGMTFIVQSSSVFTSALTPLIGIGVITIERAYPLTLGSNIGTTTTAILAALASPGNALRSSLQIALCHFFFNISGILLWYPIPFTRLPIRMAKGLGNISAKYRWFAVFYLIIFFFLIPLTVFGLSLAGWRVLVGVGVPVVFIIILVLCLRLLQSRCPRVLPKKLQNWNFLPLWMRSLKPWDAVVSKFTGCFQMRCCYCCRVCCRACCLLCGCPKCCRCSKCCEDLEEAQEGQDVPVKAPETFDNITISREAQGEVPASDSKTECTAL

SEQ ID NO: 924 - protein, 659 aa, Homo sapiens
MAAAATMAAAARELVLRAGTSDMEEEEGPLAGGPGLQEPLQLGELDITSDEFILDEVDVHIQANLEDELVKEALKTGVDLRHYSKQVELELQQIEQKSIRDYIQESENIASLHNQITACDAVLERMEQMLGAFQSDLSSISSEIRTLQEQSGAMNIRLRNRQAVRGKLGELVDGLVVPSALVTAILEAPVTEPRFLEQLQELDAKAAAVREQEARGTAACADVRGVLDRLRVKAVTKIREFILQKIYSFRKPMTNYQIPQTALLKYRFFYQFLLGNERATAKEIRDEYVETLSKIYLSYYRSYLGRLMKVQYPFEALFRSQHYALLDNSCREYLFICEFFVVSGPAAHDLFHAVMGRTLSMTLKHLDSYLADCYDAIAVFLCIHIVLRFRNIAAKRDVPALDRYWEQVLALLWPRFELILEMNVQSVRSTDPQRLGGLDTRPHYITRRYAEFSSALVSINQTIPNERTMQLLGQLQVEVENFVLRVAAEFSSRKEQLVFLINNYDMMLGVLMERAADDSKEVESFQQLLNARTQEFIEELLSPPFGGLVAFVKEAEALIERGQAERLRGEEARVTQLIRGFGSSWKSSVESLSQDVMRSFTNFRNGTSIIQGALTQLIQLYHRFHRVLSQPQLRALPARAELINIHHLMVELKKHKPNF

SEQ ID NO: 925 - protein, 723 aa, Homo sapiens
MAAAATMAAAARELVLRAGTSDMEEEEGPLAGGPGLQEPLQLGELDITSDEFILDEVDVHIQANLEDELVKEALKTGVDLRHYSKQVELELQQIEQKSIRDYIQESENIASLHNQITACDAVLERMEQMLGAFQSDLSSISSEIRTLQEQSGAMNIRLRNRQAVRGKLGELVDGLVVPSALVTAILEAPVTEPRFLEQLQELDAKAAAVREQEARGTAACADVRGVLDRLRVKAVTKIREFILQKIYSFRKPMTNYQIPQTALLKYRFFYQFLLGNERATAKEIRDEYVETLSKIYLSYYRSYLGRLMKVQYEEVAEKDDLMGVEDTAKKGFFSKPSLRSRNTIFTLGTRGSVISPTELEAPILVPHTAQRGEQRYPFEALFRSQHYALLDNSCREYLFICEFFVVSGPAAHDLFHAVMGRTLSMTLKHLDSYLADCYDAIAVFLCIHIVLRFRNIAAKRDVPALDRYWEQVLALLWPRFELILEMNVQSVRSTDPQRLGGLDTRPHYITRRYAEFSSALVSINQTIPNERTMQLLGQLQVEVENFVLRVAAEFSSRKEQLVFLINNYDMMLGVLMERAADDSKEVESFQQLLNARTQEFIEELLSPPFGGLVAFVKEAEALIERGQAERLRGEEARVTQLIRGFGSSWKSSVESLSQDVMRSFTNFRNGTSIIQGALTQLIQLYHRFHRVLSQPQLRALPARAELINIHHLMVELKKHKPNF

SEQ ID NO: 926 - protein, 117 aa, Homo sapiens
MKPPAEDLSDALCEFDAVLADFASPFHERHFHYEEHLERMKRRSSASVSDSSGFSDSESADSLYRNSFSFSDEKLNSPTDSTPALLSATVTPQKAKLGDTKELEAFIADLDKTLASM

SEQ ID NO: 927 - protein, 99 aa, Homo sapiens
MRLLAAALLLLLLALYTARVDGSKCKCSRKGPKIRYSDVKKLEMKPKYPHCEEKMVIITTKSVSRYRGQEHCLHPKLQSTKRFIKWYNAWNEKRRVYEE

SEQ ID NO: 928 - protein, 611 aa, Homo sapiens [sequence omitted]

SEQ ID NO: 929 - protein, 545 aa, Homo sapiens
MVDAAENLCPNVMKKAHIRQDLIHASTEKISIPRTFVKNVLLEQSGIDILNKISEVKLTVASFLSDRIVDEILDALSHCHHKLADHFSRRGKTLPQQESLEIELAEERPVKRSIITVEELTEIERLEDLDTCMMTPKSKRKSIHSRMLRPVSRAFEMEFDLDKALEEVPIHIEDPPFPSLRQEKRSSGFISELPSEEGKKLEHFTKLRPKRNKKQQPTQAAVCAANIVSQDGEQNGLMGRVDEGVDEFFTKKVTKMDSKKWSTRGSESHELNEGGDEKKKRDSRKSSGFLNLIKSRSKSERPPTILMTEEPSSPKGAVRSPPVDCPRKDTKAAEHNGNSERIEEIKTPDSFEESQGEEIGKVERSDSKSSPQAGRRYGVQVMGSGLLAEMKAKQENRFGLGTPEKNTKAEPKAEAGSRSRSSSSTPTSPKPLLQSPKPSLAARPVIPQKPRTASRPDDIPDSPSSPKVALLPPVLKKVPSDKERDGQSSPQPSPRTFSQEVSRRSWGQQAQEYQEQKQRSSSKDGHQGSKSNDSGEEAEKEFIFV

SEQ ID NO: 930 - protein, 394 aa, Homo sapiens
MTEQETLALLEVKRSDSPEKSSPQALVPNGRQPEGEGGAESPGAESLRVGSSAGSPTAIEGAEDGLDSTVSEAATLPWGTGPQPSAPFPDPPGWRDIEPEPPESEPLTKLEELPEDDANLLPEKAARAFVPIDLQCIERQPQEDLIVRCEAGEGECRTFMPPRVTHPDPTERKWAEAVVRPPGCSCGGCGSCGDREWLRAVASVGAALILFPCLLYGAYAFLPFDVPRLPTMSSRLIYTLRCGVFATFPIVLGILVYGLSLLCFSALRPFGEPRREVEIHRRYVAQSVQLFILYFFNLAVLSTYLPQDTLKLLPLLTGLFAVSRLIYWLTFAVGRSFRGFGYGLTFLPLLSMLMWNLYYMFVVEPERMLTATESRLDYPDHARSASDYRPRPWG

SEQ ID NO: 931 - protein, 397 aa, Homo sapiens
MFFGGEGSLTYTLGIRGNEPVYTSTQEDCINSCCSTKNISGDKACNLMIFDTRKTARQPNCYLFFCPNEEACPLKPAKGLMSYRIITDFPSLTRNLPSQELPQEDSLLHGQFSQAVTPLAHHHTDYSKPTDISWRDTLSQKFGSSDHLEKLFKMDEASAQLLAYKEKGHSQSSQFSSDQEIAHLLPENVSALPATVAVASPHTTSATPKPATLLPTNASVTPSGTSQPQLATTAPPVTTVTSQPPTTLISTVFTRAAATLQAMATTAVLTTTFQAPTDSKGSLETIPFTEISNLTLNTGNVYNPTALSMSNVESSTMNKTASWEGREASPGSSSQGSVPENQYGLPFEKWLLIGSLLFGVLFLVIGLVLLGRILSESLRRKRYSRLDYLINGIYVDI

SEQ ID NO: 932 - protein, 115 aa, Homo sapiens
MQAQAPVVVVTQPGVGPGPAPQNSNWQTGMCDCFSDCGVCLCGTFCFPCLGCQVAADMNECCLCGTSVAMRTLYRTRYGIPGSICDDYMATLCCPHCTLCQIKRDINRRRAMRTF

SEQ ID NO: 933 - protein, 524 aa, Homo sapiens
MAASKKAVLGPLVGAVDQGTSSTRFLVFNSKTAELLSHHQVEIKQEFPREGWVEQDPKEILHSVYECIEKTCEKLGQLNIDISNIKAIGVSNQRETTVVWDKITGEPLYNAVVWLDLRTQSTVESLSKRIPGNNNFVKSKTGLPLSTYFSAVKLRWLLDNVRKVQKAVEEKRALFGTIDSWLIWSLTGGVNGGVHCTDVTNASRTMLFNIHSLEWDKQLCEFFGIPMEILPNVRSSSEIYGLMKAGALEGVPISGCLGDQSAALVGQMCFQIGQAKNTYGTGCFLLCNTGHKCVFSDHGLLTTVAYKLGRDKPVYYALEGSVAIAGAVIRWLRDNLGIIKTSEEIEKLAKEVGTSYGCYFVPAFSGLYAPYWEPSARGIICGLTQFTNKCHIAFAALEAVCFQTREILDAMNRDCGIPLSHLQVDGGMTSNKILMQLQADILYIPVVKPSMPETTALGAAMAAGAAEGVGVWSLEPEDLSAVTMERFEPQINAEESEIRYSTWKKAVMKSMGWVTTQSPESGIP

SEQ ID NO: 934 - protein, 123 aa, Homo sapiens; identical to SEQ ID NO: 813

SEQ ID NO: 935 - protein, 256 aa, Homo sapiens; identical to SEQ ID NO: 913

SEQ ID NO: 936 - protein, 256 aa, Homo sapiens; identical to SEQ ID NO: 913

SEQ ID NO: 937 - protein, 283 aa, Homo sapiens
MTSGPGGPAAAAGGRKENHQWYVCNREKLCESLQAVFVQSYLDQGTQIFLNNSIEKSGWLFIQLYHSFVSSVFSLFMSRTSINGLLGRGSMFVFSPDQFQRLLKINPDWKTHRLLDLGAGDGEVTKIMSPHFEEIYATELSETMIWQLQKKKYRVLGINEWQNTGFQYDVISCLNLLDRCDQPLTLLKDIRSVLEPTRGRVILALVLPFHPYVENVGGKWEKPSEILEIKGQNWEEQVNSLPEVFRKAGFVIEAFTRLPYLCEGDMYNDYYVLDDAVFVLKPV

SEQ ID NO: 938 - protein, 564 aa, Homo sapiens
MASTSTTIRSHSSSRRGFSASSARLPGVSRSGFSSISVSRSRGSGGLGGACGGAGFGSRSLYGLGGSKRISIGGGSCAISGGYGSRAGGSYGFGGAGSGFGFGGGAGIGFGLGGGAGLAGGFGGPGFPVCPPGGIQEVTVNQSLLTPLNLQIDPAIQRVRAEEREQIKTLNNKFASFIDKVRFLEQQNKVLDTKWTLLQEQGTKTVRQNLEPLFEQYINNLRRQLDSIVGERGRLDSELRNMQDLVEDLKNKYEDEINKRTAAENEFVTLKKDVDAAYMNKVELQAKADTLTDEINFLRALYDAELSQMQTHISDTSVVLSMDNNRNLDLDSIIAEVKAQYEEIAQRSRAEAESWYQTKYEELQVTAGRHGDDLRNTKQEIAEINRMIQRLRSEIDHVKKQCANLQAAIADAEQRGEMALKDAKNKLEGLEDALQKAKQDLARLLKEYQELMNVKLALDVEIATYRKLLEGEECRLNGEGVGQVNISVVQSTVSSGYGGASGVGSGLGLGGGSSYSYGSGLGVGGGFSSSSGRATGGGLSSVGGGSSTIKYTTTSSSSRKSYKH

SEQ ID NO: 939 - protein, 513 aa, Homo sapiens
MASVLSRRLGKRSLLGARVLGPSASEGPSAAPPSEPLLEGAAPQPFTTSDDTPCQEQPKEVLKAPSTSGLQQVAFQPGQKVYVWYGGQECTGLVEQHSWMEGQVTVWLLEQKLQVCCRVEEVWLAELQGPCPQAPPLEPGAQALAYRPVSRNIDVPKRKSDAVEMDEMMAAMVLTSLSCSPVVQSPPGTEANFSASRAACDPWKESGDISDSGSSTTSGHWSGSSGVSTPSPPHPQASPKYLGDAFGSPQTDHGFETDPDPFLLDEPAPRKRKNSVKVMYKCLWPNCGKVLRSIVGIKRHVKALHLGDTVDSDQFKREEDFYYTEVQLKEESAAAAAAAAAGTPVPGTPTSEPAPTPSMTGLPLSALPPPLHKAQSSGPEHPGPESSLPSGALSKSAPGSFWHIQADHAYQALPSFQIPVSPHIYTSVSWAAAPSAACSLSPVRSRSLSFSEPQQPAPAMKSHLIVTSPPRAQSGARKARGEAKKCRKVYGIEHRDQWCTACRWKKACQRFLD

SEQ ID NO: 940 - protein, 227 aa, Homo sapiens
MFKRMAEFGPDSGGRVKGVTIVKPIVYGNVARYFGKKREEDGHTHQWTVYVKPYRNEDMSAYVKKIQFKLHESYGNPLRVVTKPPYEITETGWGEFEIIIKIFFIDPNERPVTLYHLLKLFQSDTNAMLGKKTVVSEFYDEMIFQDPTAMMQQLLTTSRQLTLGAYKHETEFAELEVKTREKLEAAKKKTSFEIAELKERLKASRETINCLKNEIRKLEEDDQAKDI

SEQ ID NO: 941 - protein, 896 aa, Homo sapiens; identical to SEQ ID NO: 888

SEQ ID NO: 942 - protein, 683 aa, Homo sapiens; identical to SEQ ID NO: 777

SEQ ID NO: 943 - protein, 654 aa, Homo sapiens [sequence omitted]

SEQ ID NO: 944 - protein, 516 aa, Homo sapiens; identical to SEQ ID NO: 787

SEQ ID NO: 945 - protein, 236 aa, Homo sapiens
MPPRELSEAEPPPLRAPTPPPRRRSAPPELGIKCVLVGDGAVGKSSLIVSYTCNGYPARYRPTALDTFSVQVLVDGAPVRIELWDTAGQEDFDRLRSLCYPDTDVFLACFSVVQPSSFQNITEKWLPEIRTHNPQAPVLLVGTQADLRDDVNVLIQLDQGGREGPVPQPQAQGLAERIRACCYLECSALTQKNLKEVFDSAILSAIEHKARLEKKLNAKGVRTLSRCRWKKFFCFV

SEQ ID NO: 946 - protein, 433 aa, Homo sapiens; identical to SEQ ID NO: 856

SEQ ID NO: 947 - protein, 135 aa, Homo sapiens; identical to SEQ ID NO: 769

SEQ ID NO: 948 - protein, 1018 aa, Homo sapiens [sequence omitted]

SEQ ID NO: 949 - protein, 663 aa, Homo sapiens
MAPKRVVQLSLKMPTHAVCVVGVEAHVDIHSDVPKGANSFRVSGSSGVEVFMVYNRTRVKEPIGKARWPLDTDADMVVSVGTASKELKDFKVRVSYFGEQEDQALGRSVLYLTGVDISLEVDTGRTGKVKRSQGDKKTWRWGPEGYGAILLVNCDRDNHRSAEPDLTHSWLMSLADLQDMSPMLLSCNGPDKLFDSHKLVLNVPFSDSKRVRVFCARGGNSLSDYKQVLGPQCLSYEVERQPGEQEIKFYVEGLTFPDADFLGLVSLSVSLVDPGTLPEVTLFTDTVGFRMAPWIMTPNTQPPEELYVCRVMDTHGSNEKFLEDMSYLTLKANCKLTICPQVENRNDRWIQDEMEFGYIEAPHKSFPVVFDSPRNRGLKDFPYKRILGPDFGYVTREIPLPGPSSLDSFGNLDVSPPVTGGGTEYPLGRILIGSSFPKSGGRQMARAVRNFLKAQQVQAPVELYSDWLSVGHVDEFLTFVPTSDQKGFRLLLASPSACPKLFQEKKEEGYGEAAQFDGLKHQAKRSINEMLADRHLQRDNLHAQKCIDWNRNVLKRELGLAESDIVDIPQLFFLKNFYAEAFFPDMVNMVVLGKYLGIPKPYGPIINGRCCLEEKVQSLLEPLGLHCIFIDDYLSYHELQGEIHCGTNVRRKPFPFKWWNMVP

SEQ ID NO: 950 - protein, 600 aa, Homo sapiens
MRSCLWRCRHLSQGVQWSLLLAVLVFFLFALPSFIKEPQTKPSRHQRTENIKERSLQSLAKPKSQAPTRARRTTIYAEPVPENNALNTQTQPKAHTTGDRGKEANQAPPEEQDKVPHTAQRAAWKSPEKEKTMVNTLSPRGQDAGMASGRTEAQSWKSQDTKTTQGNGGQTRKLTASRTVSEKHQGKAATTAKTLIPKSQHRMLAPTGAVSTRTRQKGVTTAVIPPKEKKPQATPPPAPFQSPTTQRNQRLKAANFKSEPRWDFEEKYSFEIGGLQTTCPDSVKIKASKSLWLQKLFLPNLTLFLDSRHFNQSEWDRLEHFAPPFGFMELNYSLVQKVVTRFPPVPQQQLLLASLPAGSLRCITCAVVGNGGILNNSHMGQEIDSHDYVFRLSGALIKGYEQDVGTRTSFYGFTAFSLTQSLLILGNRGFKNVPLGKDVRYLHFLEGTRDYEWLEALLMNQTVMSKNLFWFRHRPQEAFREALHMDRYLLLHPDFLRYMKNRFLRSKTLDGAHWRIYRPTTGALLLLTALQLCDQVSAYGFITEGHERFSDHYYDTSWKRLIFYINHDFKLEREVWKRLHDEGIIRLYQRPGPGTAKAKN

SEQ ID NO: 951 - protein, 527 aa, Homo sapiens; identical to SEQ ID NO: 902

SEQ ID NO: 952 - protein, 294 aa, Homo sapiens; identical to SEQ ID NO: 904

SEQ ID NO: 953 - protein, 265 aa, Homo sapiens; identical to SEQ ID NO: 883

SEQ ID NO: 954 - DNA, 3513 bp, Mus musculus
atggagctcctgcggggactaggtgtcctgttcctgttgcatatgtgtggaagcaaccgcattccagagtctgggggagataacggtgtgtttgacatctttgaactcattggaggtgcacgaaggggccccggtcgccgactggtgaagggccaagatctatccagccccgccttccgcattgagaatgccaacctgatccccgctgtgccggatgacaagttccaagacctactggacgctgtgtgggccgacaaaggcttcatcttcttggcttccttgaggcagatgaagaagacccggggcacactcctggctgtggaacggaaagacaacactggccagatcttcagtgtggtctccaacggcaaagctggcaccctggacctgagcctgagcctgccagggaagcaacaagtggtgtcagtggaggaagctctcctggccactggccagtggaagagcatcacgctgtttgttcaagaggaccgggctcaactctacatagactgtgataagatggagagcgcggagctggatgtacccatccagagcatcttcaccagggatctggccagcgttgccaggctccgagttgcaaagggagatgtcaatgacaattttcagggggtgctgcagaatgtgaggtttgtctttggaaccaccccagaagacattctcaggaacaaaggctgctccagctctaccaacgtccttcttacccttgacaacaacgtggtgaacggttccagccctgctatccgcaccaactacatcggccacaaaacaaaggacctccaagctatctgtggcctctcctgtgatgaactatccagcatggtcctggaactgaagggcctgcgcaccatcgtgaccactctgcaggacagcatccgaaaagtgacggaagagaacagagagctggtcagtgagctgaagcggcctcccctctgctttcacaatggagtccagtacaagaacaacgaggagtggactgtagacagttgcacagagtgtcactgccagaactcggttaccatctgcaaaaaggtgtcctgtcccatcatgccctgctccaacgccacagttcctgatggtgaatgctgcccacggtgctggcccagcgactctgctgacgatggctggtctccctggtctgagtggacctcctgctctgccacatgtggcaatggaattcagcaacgtggtcgttcctgtgacagcctcaacaacagatgcgagggctcttcggtacagacgaggacctgccacattcaggagtgtgacaaaagatttaaacaggatggtggctggagtcactggtctccatggtcgtcctgttctgtgacctgtggtgacggtgtgatcacaaggatccggctctgcaactcccccagcccccagatgaacgggaagccctgtgaaggtgaagcccgggagaccaaagcctgcaagaaagacgcctgcccaattaatggaggctggggtccctggtcaccatgggacatctgctctgtcacctgtggaggaggagtgcagagacgcagccgactctgtaacaaccccacaccccagtttggaggcaaagactgtgttggcgatgtgacagaaaatcaagtttgcaacaagcaggactgcccaattgatggatgcctgtccaatccctgctttgctggtgccaagtgtactagctaccctgatggtagctggaaatgtggtgcgtgtcctcctggctacagtggaaatggcatccagtgcaaagacgtcgatgagtgcaaagaagtgcctgatgcttgcttcaatcacaacggagaacatcggtgcaagaacacagatcctggctacaactgcctgccctgcccaccacgattcactggctcacagcccttcggccgaggtgtcgaacatgccatggccaacaaacaggtgtgcaaaccgcgaaacccctgcacggacgggacgcatgactgcaacaagaacgctaagtgcaactacctgggtcactacagcgaccccatgtaccgctgtgagtgcaagcccggctatgcaggcaatggcatcatctgcggagaggacacagacctggacggctggcctaatgaaaacctggtgtgtgtggccaacgcaacctaccactgcaaaaaggacaactgccccaaccttcccaactcggggcaggaagactatgacaaggacgggattggcgatgcctgcgatgatgacgatgacaacgacaagatccctgatgacagggacaactgtccattccattacaacccagcccagtatgactatgacagagatgatgtgggagaccgctgtgacaactgcccctacaaccacaaccctgaccaagcagacacagacaaaaacggggagggcgatgcctgtgctgtggacatcgatggagatggaatcctcaatgaacgagacaactgccagtacgtttacaacgtggaccagagggacacggacatggatggggttggagatcagtgtgacaactgccccctggaacacaatccagaccagctggactctgactcagacctcataggggacacttgtgacaacaatcaggacatcgatgaggatggccatcagaacaatctggacaactgtccctatgtgcctaacgccaaccaggccgaccatgataaagatggcaaaggagatgcctgtgaccatgacgatgacaatgacggcatccctgatgacagagacaactgcaggctggtgcccaatcctgaccagaaggactctgatggtgatggccgaggtgacgcctgcaaagacgactttgaccatgacaatgtgccagatattgatgacatctgtcctgagaattttgacatcagtgaaaccgatttccgacgattccagatgattcctctagatcccaaaggaacctcccaaaatgaccctaactgggttgtccgccatcagggcaaagaactcgtccagactgtaaactgtgaccctggacttgctgtaggttatgatgagtttaatgctgtggacttcagcggtaccttcttcatcaacaccgagagagatgatgactacgctggctttgtattcggctaccagtccagcagccgcttctacgttgtgatgtggaaacaagtcacccagtcctactgggacaccaaccccacaagggctcagggatactcaggcctgtctgtaaaggttgtgaactccaccaccggccctggcgagcacctgcggaatgcactgtggcacacaggaaacacccctggccaggtgcgcaccctgtggcatgaccctcgccacatcggctggaaagatttcactgcgtacagatggcgtctcagccacaggccaaagaccggttatatcagagtggtgatgtatgaaggaaagaaaatcatggctgactcgggacccatctatgacaaaacctacgccggcggtagactaggcctgttcgtcttctctcaggaaatggtgttcttctcagacatgaaatacgagtgtcgagattcctaa

SEQ ID NO: 955 - DNA, 3187 bp, Mus musculus
cggagctcagggctgaagatggttcctctcctgcccttatatgctctgctgctgctgttcctgtgtgatattaaccctgcaaatgccaacagttactatgacaaggtcctggctcacagccgcatcaggggtcgggatcagggcccaaacgtctgtgccctccagcaaattctgggcaccaaaaagaaatacttcagctcctgtaagaactggtatcaaggtgctatctgcgggaagaaaaccactgtgctatatgaatgctgccctggctatatgagaatggaagggatgaaaggctgccccgcagtgatgcctattgaccatgtttatggcacgctgggcattgtgggagccactaccactcagcactactccgatgtctcgaagctgagagaagagattgaaggaaaagggtcatacacgtacttcgcgccgagtaacgaggcttgggagaacctggattctgacattcgcagaggactggagaacaatgtcaatgttgagctactgaatgccttacacagccacatggttaataagagaatgttaaccaaggacctgaaacacggcatggttattccttcaatgtacaacaatctggggctttttattaaccattatcccaatggggttgtcactgtgaactgtgctcgagtcatccatgggaaccagattgccacaaatggtgtcgtccatgtcattgaccgtgtcctgacacaaattggtacctccatccaagacttccttgaagcagaagacgacctttcatcatttagagcagccgccatcacctctgacctcttggagtcccttggaagagatggtcacttcacgctctttgctcccaccaatgaagctttcgagaaactgccacgaggtgtcctagaaaggatcatgggagacaaagtggcttctgaagctctcatgaagtaccacatcctaaataccctccagtgctctgaggccatcactggaggagccgtgtttgagaccatggaaggaaacactattgagatagggtgcgaaggggacagtatctccattaacggaatcaagatggtgaacaagaaagacattgtgactaagaatggtgtcatccacctgattgatgaagtcctcattcctgattctgccaaacaagttattgagctggctggaaaacagcaaaccactttcaccgacctggtagcccaattaggcttggcatcctctctgaagccagatggagagtacaccttattagcacctgtgaacaatgcgttctctgatgacactctgagcatggaccaacgccttcttaagctaattctgcaaaatcacatattgaaagtaaaagttggccttagcgacctctacaatggacagatactggaaaccattggaggcaaacaactccgagtctttgtgtatcggacggctatctgcatagaaaactcatgcatggtgagaggaagcaagcagggaaggaatggtgccattcacatattccgagaaatcatccaaccagcagagaaatccctgcacgacaagctgcggcaagacaagcgctttagcatcttcctcagcctccttgaagctgcagatttgaaagatctcctgacacagcccggagattggaccttgtttgcaccaaccaatgatgccttcaagggaatgactagcgaagaaagggagcttctgattggggataaaaatgctctccaaaacatcattctttatcacctgaccccaggggtttatattggaaagggattcgaacccggagtcactaatatcctgaagaccacacagggaagcaaaatctatctgaaaggagtaaacgaaacgcttctagtgaatgagttgaagtccaaagaatctgacatcatgacgacaaatggtgtcatccacgtcgtggacaaactcctctatccagcagatattccagttggaaatgatcagctcttggaattactgaacaaactgataaaatacatccaaatcaagtttgttcgtggcagcaccttcaaagaaatccccatgactgtctatagacctgcaatgacgaagatccaaattgaaggtgatcccgacttcaggctgattaaagaaggcgaaacggtgacagaagtgatccacggagagccagtcattaaaaagtacaccaaaatcatagatggagttcctgttgaaataactgaaaaacagactcgggaagaacgaatcattacaggtcctgagataaaatataccaggatttccacaggaggtggagaaacaggagagaccttgcagaaattcttgcaaaaagaggtctccaaggtcacaaagttcattgaaggtggcgatggtcacttatttgaagatgaggagattaaaagactgcttcagggagacacacctgcaaagaagataccagccaacaaaagggttcaagggcctagaagacgatcaagagaaggccgttctcagtgaaaacccagaggccagaccacagagtttatataatcctaaatcaacgatctgattttaagggaaattgtaagagccaccacactgacttcagaatctgaaatgacaaccaacagaagccaatcttcaagcaagtccaaacacagagttcatgtctttgtttctgcatgagaaatataagaaaatgatagctagtctcctgtggggtaggaactgaggaaatataggaccatgcagggattttatctcaatgagaaaacttctgattaaagtagaatccaccaaagaacatcattgtgactgggtccatacagctaagtctttgcacagtaaaaaccttccgcctcaggaagaggctggaaaaacccaaagcacacagttacctttccaggggaggctaaggtatcaaaaggggtgttcagttatacaacatgcaaacaaacctaccaaattacgaacagtggtgttacatatttctcatgcaatgtgggtttcctgctaaattttgttatttttacacttgatttatatcctcgagatgattgtcataagcttcttgcaatacaaatgttttctctcaaacatttcaataaaaccattcttcaggtataaagagaattactgcagagttggtaattcagaaaactcaaggtttaagttaaaagtgagtttagactttggaataggacttcatacctttttttattgttaacaagtactcaataaagtaaactga

SEQ ID NO: 956 - DNA, 2373 bp, Mus musculus
atgagaacttaccggtacttcttgctgctcttttgggtcggccagccctacccaactttctcaaacccattatctaaaaggactagtggcttcccagcaaagaggaaagccctggagctctctgcagacagcaggaatgagctgagccgttcgaaaaggggttggatgtggaatcagttcttcctcctggagggatacacgggatccgattatcagtacgtgggcaagttacattcagaccaggatagaggagatggatcacttaaatatatcctttcaggagatggagcgggcgatctcttcattatcaatgagcacacaggcgacatacaggccaccaagaggctggacagggaagaaaaacctgtttacatccttcgagctcaagctgtcaacagaaggacagggagacccgtcgagcctgagtctgaattcatcatcaagatccacgacatcaatgacaatgagccaatattcaccaaggacgtttacacagccacagtcccggagatggctgatgttggcacatttgtggtccaagtcacggcgactgatgctgacgacccaacatatgggaacagtgctaaagtcgtctatagcatcctgcagggacagccctacttttcagtggaatcggaaacaggtatcatcaagacagcgttgctcaacatggatcgagaaaacagagaacagtaccaagtggtgattcaggccaaggacatgggcggccagatgggaggactgtcggggactacgaccgtgaacatcacgctgacagatgttaatgacaacccaccccgtttcccccagagtacctaccagtttaagacccccgagtcctctccaccgggaacgccaattggcaggatcaaagccagtgatgccgatgtgggagaaaatgcggagatcgagtacagcatcactgacggtgagggacacgagatgtttgatgtcatcaccgaccaggaaacccaggaagggatcataactgtcaaaaagctcttggattttgagaagaagaaggtgtacaccctcaggtggaaggcctccaatccccacgtcgaaccccgatttctctacctgggtcccttcaaagactcggccacggtgagaatcgtggtggacgatgtggacgaacctcctgtcttcagcaaactggcctacatcctacagatacgggaggatgcccggataaatacgaccatagtctctgtcgcagctcaggatcctgacgctgccaggaatcctgtcaagtattctgtggatagacacacagatatggacaggatattcaacattgattctggaaatggttcgatttttacatcaaaacttctcgaccgggaaaccctgctgtggcacaacatcacagtgatcgcaacggagattaaaaacccaaagcaaagcagccgcgttcctctatatattaaagttctcgacgtcaacgacaatgccccagagtttgctgagttctatgaaacttttgtctgtgaaaaagcaaaggcagatcagctgattcagaccctgcgtgctgttgacaaggatgatccttacagcggacaccaattttccttctccttggccccagaagcagccagcagctcaaactttactatacaggacaacaaagacaacactgcagggatcctaactcggaaaaatggctataacagacacgagatgagcacctatctcctgcctgtggtcatttcggacaacgactacccagtccaaagcagcactgggacagtgactgtccgggtctgtgcatgtgaccaccatgggaacatcgagtcctgccacgccgaggccctcatccaccccacaggccttagctctggggctctggtggccatccttctgtgcatcgtgatcctactagtgacagtggtgctgttcgcagctctgaggcggcaggaaaagaaagagcctttgatcatttccaaagaggacatcagagataacattgtcagttacaacgacgaaggtggtggagaggaagacacccaggcctttgatatcggaaccctgaggaaccctgaagccatggaggacagcaaatcgcgcagggacattgtgcctgaagctctttttctaccccggcggactccaacagctcgtgacaacacggatgttagagatttcattaaccaaaggttaaaggaaaatgacacggacccaacagcccctccttacgactccttggccacctatgcctacgaaggcaccggctcggtggccgactccctgagctcgctggaatccgtgaccacggatggagatcaagattatgactatttgagtgactggggccctcggttcaaaaaagtggcagatatgtatggagggatggacagtgacaaagactcttaa

SEQ ID NO: 957 - DNA, 1614 bp, Mus musculus
atggcttcaacccgtgccaagcccacgctacctctgctcctggccctggtcaccgttgtgatccctgggcctggtgatgctcaggtatccatccatcccagagaagccttcctgccccagggtgggtccgtgcaggtgaactgttcttcctcatgcaaggaggacctcagcctgggcttggagactcagtggctgaaagatgagctcgagagtggacccaactggaagctgtttgagctgagcgagatcggggaggacagcagtccgctgtgctttgagaactgtggcaccgtgcagtcgtccgcttccgctaccatcaccgtgtattcgtttccggagagtgtggagctgagacctctgccagcctggcagcaagtaggcaaggacctcaccctgcgctgccacgtggatggtggagcaccgcggacccagctctcagcagtgctgctccgtggggaggagatactgagccgccagccagtgggtgggcaccccaaggaccccaaggagatcacattcacggtgctggctagcagaggggaccacggagccaatttctcatgccgcacagaactggatctcaggccgcaagggctggcattgttctctaatgtctccgaggccaggagcctccggactttcgatcttccagctaccatcccaaagctcgacacccctgacctcctggaggtgggcacccagcagaagttgttttgctccctggaaggcctgtttcctgcctctgaagctcggatatacctggagctgggaggccagatgccgacccaggagagcacaaacagcagtgactctgtgtcagccactgccttggtagaggtgactgaggagttcgacagaaccctgccgctgcgctgcgttttggagctagcggaccagatcctggagacgcagaggaccttaacagtctacaacttttcagctccggtcctgaccctgagccagctggaggtctcggaagggagccaagtaactgtgaagtgtgaagcccacagtgggtcgaaggtggttcttctgagcggcgtcgagcctaggccacccaccccgcaggtccaattcacactgaatgccagctcggaggatcacaaacgaagcttcttttgctctgccgctctggaggtggcgggaaagttcctgtttaaaaaccagaccctggaactgcacgtgctgtatggtcctcggctggacgagacggactgcttggggaactggacctggcaagaggggtctcagcagactctgaaatgccaggcctgggggaacccatctcctaagatgacctgcagacggaaggcagatggtgccctgctgcccatcggggtggtgaagtctgtcaaacaggagatgaatggtacatacgtgtgccatgcctttagctcccatgggaatgtcaccaggaatgtgtacctgacagtactgtaccactctcaaaataactggactataatcattctggtgccagtactgctggtcattgtgggcctcgtgatggcagcctcttatgtttataaccgccagagaaagatcaggatatacaagttacagaaggctcaggaggaggccataaaactcaagggacaagccccacctccctga

SEQ ID NO: 958 - DNA, 2824 bp, Mus musculus
aagcagaccgatcggaattggacttgggaagagaggcgcggagtcaggcagaaaacttgtaggagaggagtaaagagccgctgcctctcctcctccactccgctgtgcttaaaggggttcccgccggccttgcgatttatttttatatctgctttttatagagagaagtatatatatatatattttttcttctaaagagaaaattcctgttccaagagaaaataaggcaacatcaatgaaggagagaagagccagccagaaattatccagtaaatctatcatggatcctaatcagaacgtgaaatgcaagatagtagtagtgggcgacagccagtgtgggaaaaccgcgctgctccacgtcttcgccaaggactgcttcccagaaaattacgtccctacggtgtttgagaattacactgccagttttgaaatcgacacacaaagaatagagttgagcctgtgggacacttcaggttctccttactatgacaacgtccgtccactctcttacccagattctgatgcagtgctcatttgctttgacatcagtagaccagagactctggacagtgtcttaaaaaagtggaaaggtgaaatccaggagttttgtcccaataccaagatgctgttggtgggctgcaagtctgatctgcggacagatgtcagcacattagtggaactctcaaatcacaggcagactcctgtgtcatatgaccagggggcaaatatggccaagcagatcggagcagccacttacatagaatgctcagctttacagtcagaaaacagcgtcagagacatttttcacgtcgccaccttggcgtgtgtaaataagacaaataaaaacgttaagcggaacaaatcgcagagggccacaaagcggatttcgcacatgcctagcagaccagaactctcagcagttgctacggacttacgaaaggacaaagcgaagagctgtactgtgatgtgaggcttcgccgtctataaggaggacgcgggaatatctggtgttttaaaaaattaataattcaaattaaaaaatgtaaaaagcaggagcaaaccggaaagatggagtcaaatgaagtgcacagccaaagtcacatagatacaggcttaggaggcccttgaaaggatacccacttttcggaatcctgtccttagtttcggcatgtagaccgagtggtgagaagcgaatgcattgaagagttttgtgtgacaagaagtgtgacttgaaaaatccgccaaaaacaaagggagctatgaacaggcgagcgctagagaagtgggggacgccagtacctccaagaagaacatccacgctctgaatggtgcttgagtattttcggttttgtgtttgtggttttgttacaacctattcgtggatctctactttttgatttcgtttttcaatgttttaatccctttttccaaaaaatatatattagtagaccgtcctcattggggaactcgcactgtgaccttagcgtttagttttctagaggatgcgatctaatttcctcctagctcatcattaaaatggaaattgtactgggacccgctgggattcgagaggaaaacttgatgcggctttgaaatcttgacttcctgaaggtcgctgctgagcaagatggtttgaaagcaagcttcagagcccttacaagatgcatagaccagcactacagagattgcgtagatcaactagaagagagtgttgctttttattctgtctgatggttttgttcatccttgtgattgtccttaacaagtggtaaattgttccgtgtaatattttttgtgcgctgtttagaagagtgtgtgtggctttgtttttctttttgccatcgttgatgaaaacgagaagtcaaataaaagatgtgatcgtcagatgtgatagcgtgattaaagaagaggcaggtggttgccgatttcaccaggagagaccttgaatgaaggagtagtagtagccgagagcacagttggtaaatggggctgtctggaacaaaattatacgtcaaatacacagagcaaaagcactcgtgtctggggatggtgcccctagactagcaacagaaagtaagctgtcgtctggtgccacttccttcaaagaaatgctgttctggcaaaacccccatttgctcatgctttagtaaaccccagtttgcaaagaagcctataatgtctgccctggtatgagcctagggcgtttctcaagtgactgctaaacctcacttaaccatacatggccagggccaggttgaaaatgttgatcgttgccagagtgataataagcatttaaaatagtttacaggtttctccttttgagcagttcctttcagagaagaaatcatttacgatctttgagagttggtgcttgttaaaaacaagctttttttttttttccccaatgatgacgcttcatttttgaagcgctggagcggtgtctcccttaaaccgcggcagaaggggaggtgaaggtaactacaacacccagctctgtgtcttcacaagcgctttgttttgtctctgcaagaaaatgccatctcagtcatttcccatgaaactcagacatcttaccaacataatacgctctgactggtacagcattatgctttgggcagtattacaaaatcgctggcaagtgctttctgtatttaaatattgtaaaaagaaaataagttataactgttataaagcagaactttttgttgctttttttttttttaatgttgaagtcactttgtatgtttgtttggtcagtgtttccacagtatttattaaaacgtatgggtttttttttttcttcaaataaaaaagtaaccatgcc

SEQ ID NO: 959 - DNA, 1899 bp, Mus musculus
agcgccagcgccagacccgcccgcaccccgcgctctccctcacgcgcgtcgcttctcctaggactcgctaacccgcactcttgctctcacccgtgagccatcgcaggatggagctgctgtgttgcgagggcacccggcacgcgccccgggccgggcccgacccgcggctgcttggggaccagcgtgtcctgcagagtttactccgcctggaggagcgctacgtgccgcgagcctcctacttccagtgcgtgcaaaaggagatcaagccgcacatgcggaagatgctggcatactggatgctggaggtgtgtgaggagcagcgctgcgaggaggatgtcttccctctggctatgaactacctggatcgctacctgtcctgcgtccccacccgaaaggcgcaattgcagcttctaggtaccgtctgcctgttgctggcctccaagctgcgcgaaaccacgcccctgactattgagaagctttgcatctatacggaccaggctgtggctccatggcagttgcgggagtgggaggtgctggtcctggggaagctcaagtgggacctggctgccgtgattgcgcacgacttcctggccttgattctgcaccgcctgtctctgcccagtgaccggcaggctttggtcaaaaagcatgcccagacctttttggccctctgtgctacagattacacctttgcgatgtatcctccatccatgatcgccacaggcagcattggggcagccgtgctaggcctaggcgcctgctctatgtctgcggatgagctcacagagttgctggccgggatcacaggcactgaagtggactgcctgcgagcctgccaggaacagatcgaagctgccctcagggagagcctcagggaagctgctcagacagcccccagcccagtgcccaaagccccccggggctctagcagccaggggcccagtcagaccagcactcccacagatgtcacagccattcacctgtagcttgagacaggccctctcaggccaccaagcagaggaggggcccctgccaccccctccctgcctctagaacaatccatgctatatctgaagcccgaggggggctctccttccccctcacaaagcccaaggggccaggtcctgcctatccccacagtgtgcactaaggggttgcatggtcatgaggggcgtcttcatggccagtcagctcctcttccttcccactcaaccagcttggctgtcctgggccatgatggtcagagaaatacaaacaggtaaaatccacacaccagcatttcttttgagtccctcttctgtccggggctccaaccttctcagttgccaaaacgccccagtaccttccaaaggtgttggcccttgcaggctccttcgggcatcccgatagaagcttatgaggagctgccctagatggcctctgtgtaatccgtactccagctgctcttagagggaacagcctaggctttggccagagcaagaacccatacactgttgctttgcttgctgcttagcttctgtgattgtggggtcttaagggtgccgtggtcattttaatttattgctttgaatacaactgtaagagggtacagtgaggcctgtaccccacaagtggtggtaaccctggcggttgctctttccctcccttcttcccctctgctactgctttgtggcccaggagctgctacagcctgggatgggggtcacgccttcctctcctcacccctccacctcatcttcatcagagcagggttaggttgggatggatcgatgccgtggaggtgacagagctatctggagagagggcaagccctagggtcacaggtctttcctcgggccacaaggtttgggctggtggcccatttctatcatgctgccttaataaagatttcggaataaa

SEQ ID NO: 960 - DNA, 1597 bp, Mus musculus
gccgttgctctctgcaaagagagatctccaaagcccaggcagagagctgcagcggctgctgagatgaacaggaaggtcacagccatagccctggctgcgatcatctgggccacagctgctcaaggcttccttatgttcaaacaggggcgctgtctttgcatcggccccgggatgaaagccgtcaaaatggcagagatcgagaaagcttctgtaatttacccgagtaacggctgcgacaaagttgaagtgattgttactatgaaggctcataaacgacaaaggtgcctggaccccagatccaagcaagctcgcctcataatgcaggcaatagaaaaaaagaattttttaaggcgtcaaaacatgtgacatcctgggaacgtctgactgtgagccctccaataagaactctgtgccaggaacctgaccctctgctgtcttggaacatgcagccacgtattaccaggctgcagaactttctagaaggtccgatacatctaaactgttctacttggctatgaaaaatatttgtctctaaaagtcacgtgcacactccacgctaccttctgtggttacagtggatgcattgttactgcaatccggaccagtgctggattcaaaagcatctctgtgtgtagtaaaacattcctcaaagaattgttcatgcaaataaacattcctttccccaaatatcacgaggcacacgaacatctaggaagacatttccacattttgtcttgtttgttcatttaaaaagactacgattcatttctgcgttgtagaaactagtaagaacactactgtttgtttcctagctagtcacactggcttccccctgaggccttctaaggggttaagatgtgtatttcctgtacgtctggttttatcagtgacaataacaaggatagatttttaaaataaattggttctgttcaccaaagaaaaatgttgaaaaaaaaatctgtgcacctctttcagtctgtttcctgtgagtctgcctttgagaaaaatatataaatatgtactttgttcttttccttggtcatactgtgaatgaatggtagggatggctggctctgtctctccttgaaaagaataagaattgtgtttctctagtaagctattataacacttattaaatcatcaacaactacatgctctctggacattgagatgcctttagattttgttttgttttgttttgttttttagagctacacaagtttttgtcagaattctttagaaacatacacgcctttaatcccagcacttgggaggcagaggcaggcggatctctgtgaggtccaggccagactggtctttcagaacagtcagggctacacaaaattttaaaatagaaaggaatatactttagtgaggaggagctgaagatgagaaaaaaatatgataaaaaggtactgttaaaaatttcaataaaaaaaattacctaggtgtggtggtatacaccttaatttcagcacttgaaaggcagaggcaggaggatctcttgagttcaaggccaacctggtctacagaccaggagtttcaggacagccagggctacacagagaaaccctatcttaaagtaaaaaaaaaaaaa

SEQ ID NO: 961 - DNA, 1063 bp, Mus musculus
catcccgagccaaccttccggaagcctccccatcagcaccatgaacccaagtgctgccgtcattttctgcctcatcctgctgggtctgagtgggactcaagggatccctctcgcaaggacggtccgctgcaactgcatccatatcgatgacgggccagtgagaatgagggccatagggaagcttgaaatcatccctgcgagcctatcctgcccacgtgttgagatcattgccacgatgaaaaagaatgatgagcagagatgtctgaatccggaatctaagaccatcaagaatttaatgaaagcgtttagccaaaaaaggtctaaaagggctccttaactggagtgaagccacgcacacaccccggtgctgcgatggatggacagcagagagcctctctccatcactcccctttacccagtggatggctagtcctaattgcccttggtcttctgaaaggtgaccagccgtggtcacatcagctgctactcctcctgcaggatgatggtcaagccatggtcctgagacaaaagtaactgccgaagcaagaattctttaagggctggtctgagtcctcgctcaagtggctgggatggctgtcctagctctgtactgtaagctatgtggaggtgcgacgcccttcaccatgtgccatgcccaggctgctccccacaccctccttgtcctccctagctcaggctcgtcagttctaagtttacctgagctcttttatttcagatgtaagactacaaatttaagtttgtaagcacgaacttaaccaccatcttcccaaggggttatcaagatactcagaggaacctgaaaatgtatgtgtaaatactatttaatgaacgactgtacaaagtagaattcctaatgtattttttgtatgctttgcattgtatatggaagaacttgtgtcatcaagtatgtatcaatgggtagttaaagtttatttttaaaaccgtccaataccttttgtattatgtaacattcaaaagacaatgtactgtattgaaagtagtaagagacccaaaatgtaataaagtaataataactgacatg

SEQ ID NO: 962 - DNA, 1567 bp, Mus musculus
ggcacgagggagaggaggagggaaagatagaaagagagagagaaagattgcttgctacccctgaacagtgacctctctcaagacagtgctttgctcttcacgtataaggaaggaaaacagtagagattcaatttagtgtctaatgtggaaaggaggacaaagaggtcttgtgataactgcctgtgataatacatttcttgagaaaccatattattgagtagagctttcagcacactaaatcctggagaaatggcttttgtgcatatcagatgcttgtgtttcattcttctttgtacaataactggctattctttggagataaaagttaatcctcctcaggattttgaaatattggatcctggattacttggttatctctatttgcaatggaaacctcctgtggttatagaaaaatttaagggctgtacactagaatatgagttaaaataccgaaatgttgatagcgacagctggaagactataattactaggaatctaatttacaaggatgggtttgatcttaataaaggcattgaaggaaagatacgtacgcatttgtcagagcattgtacaaatggatcagaagtacaaagtccatggatagaagcttcttatgggatatcagatgaaggaagtttggaaactaaaattcaggacatgaagtgtatatattataactggcagtatttggtctgctcttggaaacctggcaagacagtatattctgataccaactataccatgtttttctggtatgagggcttggatcatgccttacagtgtgctgattacctccagcatgatgaaaaaaatgttggatgcaaactgtccaacttggactcatcagactataaagatttttttatctgtgttaatggatcttcaaagttggaacccatcagatccagctatacagtttttcaacttcaaaatatagttaaaccattgccaccagaattccttcatattagtgtggagaattccattgatattagaatgaaatggagcacacctggaggacccattccaccaaggtgttacacttatgaaattgtgatccgagaagacgatatttcctgggagtctgccacagacaaaaacgatatgaagttgaagaggagagcaaatgaaagtgaagacctatgcttttttgtaagatgtaaggtcaatatatattgtgcagatgatggaatttggagcgaatggagtgaagaggaatgttgggaaggttacacagggccagactcaaagattattttcatagtaccagtttgtcttttctttatattccttttgttacttctttgccttattgtggagaaggaagaacctgaacccacattgagcctccatgtggatctgaacaaagaagtgtgtgcttatgaagataccctctgttaaaccaccaatttcttgacatagagccagccagcaggagtcatattaaactcaatttctcttaaaatttcgaatacatcttcttgaaaatcagtgtttgtcctaatagtgttgggtttttgactaaagtgctggatatatatctccaaaaaaaaaaaaaaaaaaaaaa

SEQ ID NO: 963 - DNA, 4267 bp, Mus musculus
ggttatctgctggcagcaggtttgctcggagcagagctgctgaaactgccggcaggagagcgagtgggagagaaagagagaaggcgctgagagctgagctctggggcaggcgtcagggatggagagaagtattagggtttaaagagccattctggagcaacccatctgcggagagaaggatcggcagaggtctattttagggtcgcaagtacctacttaccctaagcgagaaagtgcaaccttggtggaagctaggagaagctagggaagggtgcgagtcccggggcagcccgcagccaacgcgcccaggaggcggtgttgttccacaggggttaaggaggtggccgatcgctgtcgcccttggccgcctggagcaagaaaaggaggatctgaaggaccgagctggaggctggccctctttgcaggcagcagcggcggctgcaacgtggagcgacccagccgggtgtaggccacagcgcggccggcaggagcgggatcctcgccgcctgctccggcctctgtggatctccggggcggacagtatcccaccgagtctccgagtgagccgctccggggcgcatctgcctccccgcggctcgccaggctcgccctcggcgcgcgcgcacgcacgcgcgcacacgcgcacacatccacacgcacactcatccacacacgtgtggaaggcagggccgagccgctcggtctttgaacttctcagttagagcccggcgcagccccggccgccgctcagcgctccccgcggccctgcgtgcctcctgccagcccccggaccttctcgtctcgtcccttttggccggaggatcggagttcagatcagccactccgcaccgagcctgacacactgaactccatttcttcctcttaagtttatttctacttcagagccactcaccctctcccttccaggagaaaaaaaaaacaaacctttcttactccttaaagtgagagattccccccccaccccgccccagcatcgcatattaatatctccacgttgggaacgcgttgcattttcttttttaaaggaatcccagccaggaacgtttttctattgggcattaactttcgactgctttgcaaaagtttcgtattaaagaacaactctacctgaccgctctgagaattactagtttcttttttatatatattttttcttactttaaataacaacatcaacgtttcttccttttaaaaacatgcactactgtgtgctgagcacctttttgctcctgcatctggtcccggtggcgctcagtctgtctacctgcagcaccctcgacatggatcagtttatgcgcaagaggatcgaggccatccgcgggcagatcctgagcaagctgaagctcaccagccccccggaagactatccggagccggatgaggtccccccggaggtgatttccatctacaacagtaccagggacttactgcaggagaaggcaagccggagggcagccgcctgcgagcgcgagcggagcgagcaggagtactacgccaaggaggtttataaaatcgacatgccgtcccacctcccctccgaaaatgccatcccgcccactttctacagaccctacttcagaatcgtccgctttgatgtctcaacaatggagaaaaatgcttcgaatctggtgaaggcagagttcagggtcttccgcttgcaaaaccccaaagccagagtggccgagcagcggattgaactgtatcagatccttaaatccaaagacttaacatctcccacccagcgctacatcgatagcaaggttgtgaaaaccagagcggagggtgaatggctctccttcgacgtgacagacgctgtgcaggagtggcttcaccacaaagacaggaacctggggtttaaaataagtttacactgcccctgctgtaccttcgtgccgtctaataattacatcatcccgaataaaagcgaagagctcgaggcgagatttgcaggtattgatggcacctctacatatgccagtggtgatcagaaaactataaagtccactaggaaaaaaaccagtgggaagaccccacatctcctgctaatgttgttgccctcctacagactggagtcacaacagtccagccggcggaagaagcgcgctttggatgctgcctactgctttagaaatgtgcaggataattgctgccttcgccctctttacattgattttaagagggatcttggatggaaatggatccatgaacccaaagggtacaatgctaacttctgtgctggggcatgcccatatctatggagttcagacactcaacacaccaaagtcctcagcctgtacaacaccataaatcccgaagcttccgcttccccttgctgtgtgtcccaggatctggaaccactgaccattctctattacattggaaatacgcccaagatcgaacagctttccaatatgattgtcaagtcttgtaaatgcagctaaagtccttgggaaagccaggacacgaaaatcacggtgacaatgacatataatgacaacgatgacgaccatgatgtttgtgacaggagggagggagttttgattcatcagtgtttaaaaaaaaaaaaattggagaaaaaaaatcggtactagttcaaacattttgcaagcttgtgttctgtttgttaaaactggcatctgagattacagcaacaacaaccacaaaaatggaaggcgttagtctgcatctcacctacttcctaagagacacaaaaagaaaacatctttttttttttaaggaaaaaaataaacactggaagaatttgttagtgttaattatgtgaaaaaaaaaaaacatcaaaacaaaacaggaaaatccgttcagtggagttgtacgtattgtttccagcccgcatttcaccccacgcctctcctggttcctctgtattgctctctgcagtgggtgccctccccgtcccttcctccaagctaacagtgggttatttattgtgtgttactatataatgaacctttcattacccttggaaaacaaaacaggtgtataaatcgagaccaaatactttgccacaaactcatggatggcttaaggagtttgaactcaaataagccagggggaaggaggtcatagtggatgaccccctgtgagttgttataggactaagcaagtcttctgtggaaaaatcaaagccccagcaaacacgtgtctgccgaagcttcatggacgccatatgcccagaaggcctgttaacaaagaaaacttggaatcagtggcaatctggaagatttttttttccttttaattgtaaatggttctttgccagtttaagcaagccggtgaaatgttgacctgttttgatatgtattgtcagacttttgaccgtgaagtggctgttgatctacaatacaggtttttcctttgtcttggtatatgtaattacatggatactattaaaatagacgggtctagaagccagcatgattgaaaacacactgcagatctgtttttccaaactattaaatcgaaacagtaactactttacatgtaatgtgtagatcttaccacatttttaatattctgtaataatggttatgatttagattgaacttaaatttggacttttttttttaatgatcattcagattgtatatttgtttcctttagctggccagtacctttgaataaaacccctagattttgacttgcactacaaattcaattttttttatatactatcttccctgcctgtattttatgtattgtccatttaatgacatgagctacctgggtccattcctcccccaaccccagttccttctattttccaaaagataaaaaccaaagcccaaaaagctaggtttgagctccacagtgtttcagccttttctgcgtcagtgtgagtcatgtggcgggtgagcggtggggcttctgggatggatggttctgtgtgaacacagaagttcgcacaaatgtaggcttagctagggtttaagaatctcaactcagagtcttagtgactgggctaggaaaagtttctttaactcctatatttatggactctctttgccgttcaaaagcagacagttcaaaggaagcacctttttctttaattggtttttttggtgctcatggggtgtattaaaagacacacagtttggttgagtttttcaaagggggaaaaagtccaggccagcactcgtcattttattcataatttcatccattatttccctgatttcattgaaatacaggttttgaaagacattctttgcaggctgattaaaaaaaa

SEQ ID NO: 964 - DNA, 2242 bp, Mus musculus
  misc_feature (1328)..(1328): "n" = a, t, g, or c.
gtgggtggtggaggagcagcgtgtggctgagctgcgctgtgctccggtcctttccgctctccggcgccggcccgctcaccggctgtaaaaaatggtgaaagaaaccacttactacgatgttttgggggtaaaacccaatgccacccaggaagaattgaaaaaggcatatagaaaattggccttgaagtaccaccctgataagaatccaaatgaaggagaaaagtttaaacagatttctcaagcttatgaagttcttgctgattccaaaaaaagggaactatatgataaaggaggggagcaggcgattaaagagggcggagcaggtggtggttttggctcacccatggatatctttgatatgttctttggaggaggaggaagaatgcaaagagaaaggagaggtaaaaatgttgttcatcagctctcagtgaccttagaagacttatataatggtgcaacaagaaaactggctctgcaaaagaatgtgatttgtgacaaatgtgaaggccgaggtggtaagaaaggagcagtagagtgctgtcccaactgccgggggacaggtatgcagataaggattcatcagattggaccaggaatggttcagcaaattcagtcagtgtgcatggagtgccagggtcatggagaacgcatcagtccaaaagacagatgtaaaagctgcaatggaagaaaaatagttcgagagaagaaaattttagaagttcatattgataaaggcatgaaagatggtcagaagataacattccacggtgaaggagaccaagaaccaggactggagccaggagatattatcattgtgttagatcagaaggaccatgctgtttttacaaggcgaggagaagaccttttcatgtgtatggacatacagctggttgaagcattgtgcggcttccaaaagccaatatctactcttgacaaccgaaccatagtcatcacctctcatccaggtcagattgtcaagcatggggatataaaatgtgtgctaaatgaaggtatgccaatataccgtcggccatatgaaaagggacgtctaatcattgagtttaaggtaaactttcctgaaaatggctttctctctcctgataaactctctttgctggaaaaactccttcctgaaaggaaggaagtagaagagactgatgaaatggatcaggtagaactggtggactttgatccaaatcaggaaagacggcgtcattataatggagaagcgtatgaggatgatgaacatcaccccagaggtggcgttcagtgtcagacctcttaatgggccagtcactctttgacattctgtatgcagtagtgaatgngggaaggactgtaatcataataagctcactacttggctattgtttttgttttaatattcaactatagtagtgttttaaaaaaagttaaatgaagaataaacacaaatataaaagctctgactttgccctgtatgtatgatgacttcagtgttcaagatgaaaatgaatacttgtaaaaactagtttaaaaagttccctagcatctgttaggtcatatcttgtgtaactgataatagctgtgtacattagactgacatgctaggtatgtgttgtatgacccttcattgttaagctatgggattaaaattctgtatttaactggtaatcaaaagaaaacaattagttacatgtcggtctgtctagttatatgaagtgaaccaattgtgatgcctttgcattgtattgcctcagccattactagaaggtggcataatacatttcgcctgtgttattagtgatagaaatgattcattcctaaagaagtttatcataagctactgcttaagggcttgctcttctagattgcatccccttctgctgtgcaatttttaagatatatatataaacagaaaacatgatcacctttttccccttctcaaaccatgataagcccttgcttgggtgtagtgacttccaaagcccaagtaacttacaaatgaaagtgatgagatctgtacgtggaggggtgatttgcatgtataatccagggaaggtgctccttaggtctgttccaggctttctattcgacttaggctccaacgtaactgcaatttaatgttggtagtatagcaaattatgaatagatttgttgtatgttttgaagtcacatgcttacatgcttaaatctggatatcagaatttaagcagttactgaaatgtatggctgtctaatatactgattacaaagtgttaaa

SEQ ID NO: 965 - DNA, 1084 bp, Mus musculus
cggcacgagcgcgcatcggactctgggaatctttacctgcgctcgggttccctccgcactcttttggataacttgctgttcgtggatcgcacaatgactctggaagaagtccgtggccaggatacagttccggaaagcacagccaggatgcagggcgccgggaaagcactgcacgaacttctgctgtcggcgcacggccagggctgtctgaccgctggcgtctacgagtccgccaaagtcctgaatgtggaccctgacaatgtgaccttttgcgtgctggctgccgatgaagaagatgagggcgacatagcgctgcagatccatttcacgttgattcaggcgttctgctgtgagaacgacattgatatcgtgcgcgtgggagacgtgcagaggctggcggcgatcgtgggcgccgacgaagaggggggcgcgccgggagacctgcattgcatcctcatttcgaatcctaatgaggacacatggaaggaccctgccttggagaagctcagtttgttctgcgaggagagccgcagcttcaacgactgggtgcccagcatcacccttcccgagtgacagcctggcagggaccttggtctgatcgacttggtgacactctagcgcgctgctggctctggagtggccctccgagggcgctcgagtgcgcgtggagactggcaggcgatgttgcctggagagcgaggagcgcggcctcccaagaagggggtctggcggcagcggggacaccttgttccgagcccaggactctgccagtgtccggagaggctgctagcacaggaaggcctaggcgaggacgttggccccagggccgggaagaaccgaccagcgaggcaggtgtgactcagcaagcagccttccagtgaaaggaggggaaagaaaggcaggcgaccgcctggacttggtacagcggcaggagcggccactgcaggagcgagctggacttagccgactgcactgctctttcaaaaaacggatcccgggcaatgctttcattttctaaaggacgctatcgtggaagctttgaatatcacaataaacttattgaaacaaaaaaaaaaaaaaaaaa

SEQ ID NO: 966 - DNA, 3991 bp, Mus musculus
aggccccacgggacacagtgtcactggtttgaaacttctcagccaccttggtgaagggactgagctgttagagacacttctgaggctcctcacgcttgggtcttgttcactccacggagtagcctagtcaactgcaagagaacggagaacgttggatttggagcagaagtgcaaagtctcagacatggcttgcccctggaagtttctcttcaaagtcaaatcctaccaaagtgacctgaaagaggaaaaggacattaacaacaacgtgaagaaaaccccttgtgctgttctcagcccaacaatacaagatgaccctaagagtcaccaaaatggctccccgcagctcctcactgggacagcacagaatgttccagaatccctggacaagctgcatgtgacatcgacccgtccacagtatgtgaggatcaaaaactggggcagtggagagattttgcatgacactcttcaccacaaggccacatcggatttcacttgcaagtccaagtcttgcttggggtccatcatgaaccccaagagtttgaccagaggacccagagacaagcctacccctctggaggagctcctgcctcatgccattgagttcatcaaccagtattatggctcctttaaagaggcaaaaatagaggaacatctggccaggctggaagctgtaacaaaggaaatagaaacaacaggaacctaccagctcactctggatgagctcatctttgccaccaagatggcctggaggaatgcccctcgctgcatcggcaggatccagtggtccaacctgcaggtctttgacgctcggaactgtagcacagcacaggaaatgtttcagcacatctgcagacacatactttatgccaccaacaatggcaacatcaggtcggccatcactgtgttcccccagcggagtgacggcaaacatgacttcaggctctggaattcacagctcatccggtacgctggctaccagatgcccgatggcaccatcagaggggatgctgccaccttggagttcacccagttgtgcatcgacctaggctggaagccccgctatggccgctttgatgtgctgcctctggtcttgcaagctgatggtcaagatccagaggtctttgaaatccctcctgatcttgtgttggaggtgaccatggagcatcccaagtacgagtggttccaggagctcgggttgaagtggtatgcactgcctgccgtggccaacatgctactggaggtgggtggcctcgaattcccagcctgccccttcaatggttggtacatgggcaccgagattggagttcgagacttctgtgacacacagcgctacaacatcctggaggaagtgggccgaaggatgggcctggagacccacacactggcctccctctggaaagaccgggctgtcacggagatcaatgtggctgtgctccatagtttccagaagcagaatgtgaccatcatggaccaccacacagcctcagagtccttcatgaagcacatgcagaatgagtaccgggcccgtggaggctgcccggcagactggatttggctggtccctccagtgtctgggagcatcacccctgtgttccaccaggagatgttgaactatgtcctatctccattctactactaccagatcgagccctggaagacccacatctggcagaatgagaagctgaggcccaggaggagagagatccgatttagagtcttggtgaaagtggtgttctttgcttccatgctaatgcgaaaggtcatggcttcacgggtcagagccacagtcctctttgctactgagacagggaagtctgaagcactagccagggacctggccaccttgttcagctacgccttcaacaccaaggttgtctgcatggaccagtataaggcaagcaccttggaagaggagcaactactgctggtggtgacaagcacatttgggaatggagactgtcccagcaatgggcagactctgaagaaatctctgttcatgcttagagaactcaaccacaccttcaggtatgctgtgtttggccttggctccagcatgtaccctcagttctgcgcctttgctcatgacatcgaccagaagctgtcccacctgggagcctctcagcttgccccaacaggagaaggggacgaactcagtgggcaggaggatgccttccgcagctgggctgtacaaaccttccgggcagcctgtgagacctttgatgtccgaagcaaacatcacattcagatcccgaaacgcttcacttccaatgcaacatgggagccacagcaatataggctcatccagagcccggagcctttagacctcaacagagccctcagcagcatccatgcaaagaacgtgtttaccatgaggctgaaatcccagcagaatctgcagagtgaaaagtccagccgcaccaccctcctcgttcagctcaccttcgagggcagccgagggcccagctacctgcctggggaacacctggggatcttcccaggcaaccagaccgccctggtgcagggaatcttggagcgagttgtggattgtcctacaccacaccaaactgtgtgcctggaggttctggatgagagcggcagctactgggtcaaagacaagaggctgcccccctgctcactcagccaagccctcacctacttcctggacattacgacccctcccacccagctgcagctccacaagctggctcgctttgccacggacgagacggataggcagagattggaggccttgtgtcagccctcagagtacaatgactggaagttcagcaacaaccccacgttcctggaggtgcttgaagagttcccttccttgcatgtgcccgctgccttcctgctgtcgcagctccctatcttgaagccccgctactactccatcagctcctcccaggaccacaccccctcggaggttcacctcactgtggccgtggtcacctaccgcacccgagatggtcagggtcccctgcaccatggtgtctgcagcacttggatcaggaacctgaagccccaggacccagtgccctgctttgtgcgaagtgtcagtggcttccagctccctgaggacccctcccagccttgcatcctcattgggcctggtacgggcattgctcccttccgaagtttctggcagcagcggctccatgactcccagcacaaagggctcaaaggaggccgcatgagcttggtgtttgggtgccggcacccggaggaggaccacctctatcaggaagaaatgcaggagatggtccgcaagagagtgctgttccaggtgcacacaggctactcccggctgcccggcaaacccaaggtctacgttcaggacatcctgcaaaagcagctggccaatgaggtactcagcgtgctccacggggagcagggccacctctacatttgcggagatgtgcgcatggctcgggatgtggctaccacattgaagaagctggtggccaccaagctgaacttgagcgaggagcaggtggaagactatttcttccagctcaagagccagaaacgttatcatgaagatatcttcggtgcagtcttttcctatggggcaaaaaagggcagcgccttggaggagcccaaagccacgaggctctgacagcccagagttccagcttctggcactgagtaaagataatggtgaggggcttggggagacagcgaaatgcaaccccccccaagcccctcatgtcattcccccctcctccaccctaccaagtagtattgtactattgtggactactaaatctctctcctctcctccctcccctctctccctttcctcccttcttctccactccccagctccctccttctccttctcctcctttgcctctcactcttccttggagctgagagcagagaaaaactcaacctcctgactgaagcactttgggtgaccaccaggaggcaccatgccgccgctctaatacttagctgcactatgtacagatatttatacttcatattt

SEQ ID NO: 967 - DNA, 475 bp, Mus musculus
cccatgcctaacactgcctgggtgatccagaacctagatcagatagcccagcgaaccttgagtaaaaccaaatactattgttgtattaaaaaaaaaaaagtagcaatataatgactcttcctgacattctgcagtactcattaatcagtgccttgctcagccatcatcacagaagcttccccctgccacagatgggaacaaatgcagagaggcccacagccagacactgtacagagagagaatgagagtcttgggaacactcaaccttaagtagggtgtctttatcaaacccctcccctcggggctcaggaacactgtgaaagaggaaacagaaaaactataacagccagagaggacagagggcaccaagaaaaacacccacctcgcgggggctggagagatggctcagaggtcaagagcactggctgctcttctggaggtccctggttcagtttccagaatccacatggcagtt

SEQ ID NO: 968 - DNA, 3436 bp, Mus musculus
aggggcggatggaggaccgcggagcgaggccggggcggctgatgcccatgctcgccctgctctcctgggcggccggcctgggcgtggcggaggagacgcccgggcgcatccctgcagataaattattagtcataactgtcgcaacaaaagaaaatgatggattccacagatttatgaattcagccaagtatttcaattacactgtgaaggttcttggtcaaggtcaggagtggagaggcggtgatggaatgaacagtatcggagggggccagaaggtgagattactgaaagaagctatggagcactacgccagtcaggaagatctggtcatcttgtttaccgagtgttttgatgttgtatttgctggtgggcctgaagaagttcttaaaaagttccaaaagacaaatcataaaatcgtctttgcagcggacgggctgctgtggccagataagcggctggcagacaagtaccctgttgtgcacattgggaaacgctacctgaattctggaggctttattggctatgccccgtacatcagccgtctggtccagcagtggaatctgcaggataatgatgatgatcagctcttttacacgaaagtttacatcgacccactgaagagggaagcttttaacatcacactggatcacaaatgcaaaattttccaggccttgaatggagctacagatgaagttgttttaaagtttgaaaatggtaaaagcagagtgaagaatacattttatgaaacactgccagtggcaattaatggaaatgggcccaccaagattctcctgaattactttggaaactatgttccaaactcatggacacaggaaaatggctgtgcgctttgtgatgttgacacaattgacttgtctacagtagatgtccctcccaaggttacactgggtgtttttattgaacaaccaaccccctttctacctcgattcctgaacttactgttaacactggattatcccaaagaagcccttcaactctttattcataataaagaagtttatcatgaaaaggacatcaaagtgtttgttgataaagctaagcatgacatcagctctataaaaatagtaggaccagaggagaacctaagtcaagcagaagccaggaacatgggcatggatttctgccgtcaggatgaaaagtgtgattactactttagtgtggatgcagatgttgttttgacaaacccaagaactttaaaaattttgattgaacaaaacaggaaaatcattgctcctcttgtgacacgtcatggaaagttgtggtccaacttttggggagcactgagtcctgatgggtactatgctcgctctgaagattacgtggatattgttcaggggaacagagtaggaatctggaatgtcccatatatggctaatgtgtacttaattcaaggaaagacactccgatctgagatgaatgaaaggaactattttgtccgtgataagttggatcccgatatggctctttgccgcaatgctagagatatgggtgtgtttatgtacatttctaacagacatgaatttggacggctgatatcaactgctaattacaacacttcccatcttaacaatgacttctggcagatttttgaaaatcccgtggattggaaggaaaaatatataaatcgtgattattcaaagattttcactgaaaatatagtcgagcagccttgtccagatgtcttctggtttcccatattttctgaacgagcctgtgatgagttggtagaagaaatggagcattatggcaagtggtccggcggaaagcatcacgatagccgcatatcgggtggttatgaaaatgtcccgactgacgatattcatatgaagcagatcgggctggagaatgtttggcttcatttcatccgagagttcattgctccagtcacactgaaggtcttcgcaggctattatacaaagggatttgcactgctgaattttgtagtaaagtactcacctgaaagacagcgctcgctccgtccccaccacgatgcctcaacctttaccatcaacattgctctgaataatgtaggagaggattttcagggaggtggatgcaaatttctgaggtataattgctccattgagtccccacgaaaaggctggagcttcatgcatcctgggaggctcacacatttgcacgaaggacttcctgttaaaaatggaacacgatacattgcagtgtcatttatagatccctaagttatttacgtaactcaaactgaatggctctctgagatggatgactggcgtgaacatgtctctgaagttgtacttgagaagacaagaagaataatgtcaacagaacaacatcactttgggccaagcatttgaacactttttatataaaattgtgtgatgtctctttatgtctgctctgagccttaaaacacaggttgaagaagaaaagaaaggaaaaaaaagtgaaagttggtatttatttctgtgctttaattgtctctgaaaataatgacagtttataaaatgtttaggtacaaaggcataaatgataataagtaagcctggtaatatgttcttatttaagaagaacctgagaaggttttatttatcggtgggggaagtatagcaaacggttctaaatgaaaatcagcaaacctgaaagcctgggattctgacgcctactggctctatgtaattattaagtcacattgacctctgtgtagggctgttttccaggaattaggaagaaaacccaaagaaaatattgcacaaaggtttccctcaggaaacctagtgcagatagccatggaagcatagccactggaaaggaacagcgcatgaggcagatgttcgtttctggtggaaattgggcccctgtgttcctccagggcaagtctcaggggaagctcatgtctttctgctttacaaagtgcttcaagtgtcagctccaagtgtccttatgtcagcagaatttgtttccttctagtccccccccccattatagaaaatagtaaggaaaaataacagtttcattgagatcagtagtaaattttactatgtttttttaaagcttacgtacttgaattttatatcaggaagatggtttttgagcctgttccttacccttgactatagttggtagttggtctcttttttccccctaggggaggggtttttctttccctcactgcaatctattttctcattcttagtctccttaattacttttcctctaccctacttgttaaaagttcccacagcaaaattttttatttcaatttttaatatttctccaaatgaggtttaaatatactatagctactgtttttaatttaaaggttaaacttgaagaaagtctttattcacggtgccaaaattcatttttctaactctgtgtgttaggaaataatgaaaaataaaataatttaaaacaaaaaaaaaaaaaaaaaaaaaaa

SEQ ID NO: 969 - DNA, 3316 bp, Mus musculus
ggcggcgagctcagggtgactgcgtgcagagcagccgcgcaggacgtccgtctctgcgcgcagtgacttctgcctgcgctcaagcttcagagttcagtttcaaggagccgcccgaccatgaagacaccgtggaaggttcttctgggactgcttggtgtcgctgcgcttgtcaccatcatcaccgtgccaatagttctgctgagcaaagatgaagcggcagctgacagccgcagaacgtattcactagctgactatttaaagagtacctttcgggtcaagtcctactctttgtggtgggtttcagactttgaatacctctacaaacaagagaacaatatcttgctgctcaatgctgaacatggaaacagctccattttcttggagaacagtacctttgaaagctttggatatcattcagtgtcacctgaccgactgtttgttctcttggaatacaactacgtgaagcaatggagacattcctacacagcttcatacaacatttatgatgtgaataaaagacagctgatcacagaagagaagattccaaataatacacagtggatcacatggtcaccagaaggtcataagttggcatatgtctggaagaatgatatttacgttaaagttgaaccacacttacctagtcataggatcacatcgacaggagaagaaaatgtaatatataatggaataactgactgggtttatgaagaggaagtcttcggtgcctactctgcactgtggtggtctccaaacaacacgtttctagcttatgcccagtttaacgacacaggagtgccgctcattgaatactccttctattctgatgagtcactgcagtaccccaagacagtgtggattccatacccaaaggcaggagctgtgaatccaactgtaaagttctttattgtaaatatagactctctcagctcatcctctagtgcggctcccatccaaatccctgctcctgcatctgtggcaagaggggatcactatttatgtgatgtggtgtgggctacagaagaaagaatttcactacagtggctcaggaggattcagaactattccgtgatggctatctgtgactatgataagatcaacctaacgtggaactgtccatccgagcagcagcatgttgaaatgagtaccacaggctgggtcggaagatttaggcccgcagaacctcacttcacctctgatggaagcagcttctataagatcatcagcgacaaagatggctacaaacacatctgccacttcccgaaagataagaaagactgtacatttattacaaaaggagcctgggaagtcattagtatcgaagctctgaccagcgattatctatactacattagtaaccaatataaagaaatgccaggaggaagaaatctctataaaattcaacttactgaccacacaaatgtgaagtgccttagttgtgacctgaatccagaaagatgtcagtattatgcggtatcatttagtaaagaggcaaagtactatcagctgggatgttggggccccggtctgcccctctacactctacatcgtagcacggatcataaagagctgcgagtcctggaagacaattctgctttggatagaatgctgcaggatgtccagatgccttcaaaaaaattggacttcattgttttgaatgaaacaagattttggtatcaaatgatcttgccccctcattttgataaatccaagaaatatcctctactattagatgtatatgcaggtccctgtagtcaaaaagcagatgcttccttcagactgaactgggccacttaccttgcaagtacagaaaacatcatagtagctagctttgacggcagaggaagtggttaccaaggagataagatcatgcatgcaatcaacagaagattgggaacactggaagttgaagatcaaattgaagcagccaggcaatttgtaaaaatgggatttgtggatagcaagcgagttgcaatttggggctggtcatatggagggtatgtaacctcaatggtcctgggatcgggaagtggcgtgttcaagtgcggaatagctgtggcacctgtgtcacggtgggagtactatgactcagtgtacacagagcgttacatgggtctcccaattccagaagacaaccttgaccattacaggaactcaacagtcatgagcagagctgaacattttaaacaagttgagtacctccttattcatggaacggcagatgataatgttcactttcagcagtcagctcagatctccaaagccctggtggatgctggtgtggatttccaagcaatgtggtacacggatgaagaccacgggatcgctagcagcacagctcaccagcacatctattcccacatgagccatttcctccagcagtgcttctccttacactagcacagcatagctctccatagcttatttaagaccacatttgttctcattatctcaaaagtgcactgttaagatgaagatcttaataatgttgcattgagacatttcaggctgctttctccagttttacacctgcaatcctaactaaggatgcctgtccccagaacagattactaccttagagcaatttggattttcccctctgttttgtttatcatttaaaatcatttccacatcagctgcctgaaacaacaaatataaattatttttgccaagagctatgcatagatttcctgagcagaatttcaattttttttttccttactagactggaccaaatctcgtttcccttatttaagtgggtgacaagatgtgggtaatgattcattagggcagcaacaagagaagagggagcagggagtatggctagaaacccaggtccaagcatacaaaccaaccaggctactgtcagctcgcctcgagaagagctgttcactgccagactggcacagttttctgagaaagactattcaaacagtctcaggaaatcatatatgcaaagcactgacttctaagtaaaaccacagcagttgaatagactccaaagaaatgcaagggacgctgccagcaatgtaagggccccaggtgccagttatgcgtataggtgctacaaaaacacagcaagggtgatgggaaagcattgtaaatgtcttttgaaaattaccgatgtctcctagtgaaaagaggcagcttggaacatatcgacttgccctgttaaaagttgaaaatatttgtgtcacaaattctaacatgaaggaatacttgcattagtttttcctacttcatttctttgagcattttaattaaaatattttaacttcattagctttttaatggaaaattaaaaaaaaaaaaaaaa

SEQ ID NO: 970 - DNA, 1452 bp, Mus musculus
gagcaagggggtgtttcctgggacagggggcggagactggagactataggctcccccaggactcaagttcattgagtttctgcagacactgaacggctttctgcttcccgctgtgactatcacctgtgggctccacctgcctgcacctttagtcagcacctttagccagcacctgcgccagaccccagcaatggcgaaccatgcgcccttcgaaacggatatcagcaccctgacccgcttcgtcatggagcagggcaggaaggctcagggcacgggggagttgacccagctgctgaattcgctctgcaccgcgatcaaagccatctcgtctgcggtgcgccaggcgggcatcgcacagctctatggtatcgctggctcaaccaatgtgactggggatcaagtaaagaagctggacatactttccaatgacctggtgatcaatatgctgaagtcgtcctacgctacctgtgttcttgtgtctgaagaaaacacaaatgccatcataatcgaacctgagaagaggggcaaatatgttgtctgtttcgatccccttgatggctcatccaacattgactgccttgtgtccatcggaaccatttttggcatttacagaaagaaaagtactgatgagccttctgagaaggatgctctgcagcccggccgggacctggtggcagccgggtatgcgctctatggcagtgccaccatgttggtccttgccatggattgtggtgtcaactgcttcatgctggacccgtccattggagaattcattatggtggacagggacgtgaagatgaagaagaaaggtaacatctacagccttaatgagggttatgccaaggactttgaccctgccatcaatgagtatctccagaggaaaaagttccctccggatggttcagccccctatggtgcccggtatgtggggtccatggtggctgatattcaccgcactctggtatatggagggatctttttataccccgccaacaagaaaagcccaagtggaaagctgcggctgctgtatgagtgcaaccccatagcttatgtcatggagaaggccggtgggctcgccaccacgggggacaaagatatattagacatcgttcccaccgagatccaccagaaggcaccagtcgtcatggggtcctctgaagatgtgcaggagttcctggagatctacaggaagcacaaagccaagtgaaggccagccttgcccctgccccagagcagagctcaagtgacgctactccattctgcatgttgtacattcctagaaacaaacctaacagcgtggatagtttcacagcttaatgctttgcaatgcccaaggtcacttcatcctcatgctataatgccactgtatcaggtaatatatattttgagtaggtgaaggagaaataaacacatctttcctttataaattaaaaaaaaaaaaaaaaaaaaaaa

SEQ ID NO: 971 - DNA, 270 bp, Mus musculus
tcttttaaaaaaaactttatttgagaaaggaagagacttataacagaaggcataaagggcaacatacaaacaatatatttacaacacaaaacaagagatcacctccaagggtgcaaatcataataaatacagtagatcttagaagacatcgattagttaattctaaggttagttatgtccagcttttctttttactggttccaggtagtttcttgactaaattcaaagactatcaaattcaaacaattaacgtccaccaaatatactgat

SEQ ID NO: 972 - DNA, 1446 bp, Mus musculus
atggcagacatgcccagtggcgagtcctgcacctctccactggagctgttcaacagcatagctactcaaggggagctcgtgaggtccctcaaagctggaaatgcaccaaaagatgagattgattctgcagtaaagatgttgttatcattaaaaatgagctataaggccgccatgggggaggagtacaaggctggctgccctcctgggaacccaacagctgggagaaattgtgactctgatgccacaaaagccagcgaggattttgtggatccatggacggtccggacaagcagtgcaaaaggcatcgactatgacaagctcattgttcagcccggaagcagcaaaattgacaaagagctgataaaccgaatagagcgagccactggccaaagaccgcaccgcttcctgcgccggggcatcttcttctcccaccgagatatgaatcaaattctggatgcctatgaaaataagaagccattctacctgtacacaggcaggggcccctcctccgaagcaatgcatctgggtcatctcgtcccgtttattttcacaaagtggctagaggatgtgttcaatgtgcctttggtcatccagatgtctgacgacgagaagtacctgtggaaggacttgactctggagcaggcatatagctacaccgtagaaaatgcaaaggacatcattgcctgtggcttcgacatcaacaaaactttcatcttctctgatcttgagtatatggggcagagcccgggcttctacaggaacgtggtgaagattcagaagcacgtcaccttcaaccaagtgaaaggcattttcggctttacggacagtgactgcatcgggaagagcagttttcctgctgtccaggccgcgccatcgttcagcaactctttcccgaagatcttccgagacaggacagatatccagtgcctcatcccgtgtgccattgaccaggatccgtacttcagaatgacaagggacgtggcccccaggatcggccatcctaaacctgccctgctgcactcgaccttcttccctgccctgcagggcgctcagaccaagatgagtgccagtgaccccaactcctccatcttcctcactgacacggccaagcagatcaagagcaaggtcaacaagcatgcattttctggaggaagagatactgtggaggagcacaggcagtttgggggcaactgtgaagtggatgtatccttcatgtatctgaccttcttccttgaagatgacgacaggctggagcagatcagaaaggattacaccagcggagccatgctcaccggggagctcaagaagacgctcatagacgtccttcagcccctgatcgcagagcaccaggcccgacgcaaggcggtcactgaggagaccgtgaaggagttcatgacgccccggcagctgtccttccacttccagtgcttctgctttgacacttga

SEQ ID NO: 973 - DNA, 1112 bp, Mus musculus
gccagtggagaatgagcccgtttgcctctgagtcagcatggctctgcttggctgccgctgcagtgctggggggcacgcttctctgcggatgccggagtggcaggcagctgcggagcaggccggtgtgtctcgctggcctctggggaggtgcctgcctgctcagtctgtccctcctctgcaccttgttcctcttatccgtggcctgcttccttcttctgtatatgagttcatctgaccaagacttgttacctgtggatcaaaaggccgtgctggtgacaggtgctgattccggtttcggtcacggtttggccaagcacctggacaagctgggtttcacagtgtttgctggagtgctggacaaagagggcccgggagcagaggaactgagaaaacactgctctgagcgtctttcagtgctccagatggatgtcaccaagccagagcagataaaagatgctcacagcaaagtcacagagaagatacaagacaaaggactgtgggccgtggttaacaatgccggggtcttccacttacctatcgacggggaactcatacccatgagcatctacagaaaatgcatggccgtgaacttcttcggaactgtcgaggtcaccaaggcgtttctgcctctacttagaaagtccaaggggaggctggtgaacgtcagcagcatgggaggcacggttccacttcaaatgacatcagcttatgcagccacaaaggcagctctaaccatgttctcaacaatcatcagacaggagcttgacaaatggggagttaaagttgtgaccatcaaacccggaggcttcaaaacaaacatcacaggctcacaggacatttgggataaaatggagaaggaaatcctggaccacttttccaaagatattcaggagaactatggccaggactacgtccatacacagaagctcatcatcccgaccttgaaagagaggtccaacccggacatcacccctgtgcttcgggacatccagcatgccatttctgcaaggaacccctcttccttttattacccagggcgaatggcttacctgtgggtctgcttagcagcctactgccccaccagctaagaacggccatgcaccaccacccac

SEQ ID NO: 974 - DNA, 417 bp, Mus musculus
tttttttttttttttttgaaaatagatcataaaattttatttgtgatttttaaatcatacacattttttaaaatgcacttgtagatatcttgcatttatcatagaaatattccacaggttgtcatttctcacttactttctatagattcattttaaaatgtgccataaagaaggaataaatgaatttatgtgatgctatttactgattataaaaataaagatatggggaaaaacactgatcaatatccaaagatacacatttctctttcattaattttgaattcacatgagtatcaaagtaaagttagttaggtttattatgtagcaggttcagatatgacacactttgttgttgaatcttgaagcctatggctcagcgctgtgtaatctaccccttgtttgaacattaatttgctc

SEQ ID NO: 975 - DNA, 806 bp, Mus musculus
gccgagccccgctctgctgagatgctgcgggcaggagcacctaccgccggctcgttccggacggaagaagtccacaccgggacaaccatcatggcagtggagtttgacgggggtgtcgtggtgggctctgattcccgggtgtcagcgggaacagcagtggtgaaccgcgtgttcgacaagctctcccctctgcaccagcacatcttctgtgccctctcaggttccgctgctgatgcccaagccatagctgacatggccgcctaccagctggagctacacgggttggagctggaggagccgcccctcgttctggctgctgcaaacgtggtgaagaacatctcctacaagtaccgtgaggacttgttagcgcatctcatagtagctggctgggaccaatgtgaggggggacaggtatatggaaccatgggagggatgctaattcgacagccctttaccatcggcggttccggaagctcctacatttatggttatgtggacgcagcttataagccaggcatgacccctgaggagtgccggcgtttcaccacagatgccatcactctggccatgaaccgagatggctctagtgggggtgtcatctacctggtcaccatcacagctgctggtgtggaccatcgagtcatcctgggagatgagctgccaaaattctacgatgagtgactgatccccagaggtcccttccttgtttgtaataaactttctggaaccagaaggccggtgcgatgggcaaaggtgaaatatgtgtatcagagagacacggtgtgtggagggaagcgtcctccccg

SEQ ID NO: 976 - DNA, 1916 bp, Mus musculus
tggacaagttcatagaggattacctccttcccgacaccacctttggtgctgatgtcaaatcagccgtcaatgtcgtgtgtgatttcctgaaggagagatgcttccaaggtgctgcccacccagtgagggtctccaaggtggtgaagggtggctcctcaggcaaaggcaccacactcaagggcaagtcagacgctgacctggtggtcttccttaacaatctcaccagctttgaggatcagttaaaccgacggggagagttcatcaaggaaattaagaaacagctgtacgaggttcagcatgagagacgttttagagtcaagtttgaggtccagagttcatggtggcccaacgcccggtctctgagcttcaagctgagcgccccccatctgcatcaggaggtggagtttgatgtgcttccagcctttgatgtcctgggtcatggtagtatcaataagaagcctaatcccttaatctacaccatcctcatctgggaatgtacctccctggggaaggatggcgagttctctacctgcttcacggagctccagcggaacttcctgaagcagcgcccaaccaagctgaagagtctcatccgcctggtcaaacactggtaccaactgtgtaaggagaagctggggaagccactgcccccacagtatgccctggagctactcactgtctatgcctgggaacaggggaatggatgtaatgagttcaacacagcccagggcttccggaccgtcttggaactggtcatcaattatcagcatcttcgaatctactggacaaagtattatgactttcaacacaaggaggtctccaaatacctgcacagacagctcagaaaagccaggcctgtgatcctggacccagctgacccgacagggaatgtggctggtgggaacccagagggctggaggcggttggctgaagaggctgatgtgtggctgtggtacccatgttttatgaaaaatgatggttcccgagtgagctcctgggatgtgccgacggtggttcctgtaccttttgagcaggtggaggagaactggacatgtatcctgctgtgagcacagcagcacctgcccaggagactgctggtcaggggcatttgctgctctgctgcaggcccatgacccagtgaggcagggccccacctggcatcagactccgtgcttctgatgcctgccagccatgtttgactcctgtccaatcacagccagccttcctcaacagattcagaaggagaggaaagaacacacgcttggtgtccatctgtccacctgttggaaggttctgtctgacaaagtctgatcaacaataaaccacagcaggtgcccgtcatggtgtgtgaactctgcaggagtgggccatacaagaacagtgcaggtgtgtgagcgtgtgtgtgcccatgacatgcgtgtgtgtcttcacggttcaactagatgcatttagtgagcacttactacatatgctacatgattcagatgttcagcagtggttagagcaaagcctaactgctaggctttttgatgcaagttggattgggatccttccaggtctcttcttacacatacacacaagagaggacccttggtttcttctgcccatgacccaagacagattctagccctgccctatgacacagaaactattccctgccacacatggacatgaacactgagactgtggcctgtgctctcaggtgcccttgagtggcatcaacatgcaggctgggggcccataggtatgatgaaaataaaaggtacctggaattttgacacatgtaactttgaaacagggtcattggtagcaacgatcagctttatcacatttagttaaatcacaatgattgtggtttcctttctgagacatgaatttgtgtgacacacgctgtcgtggaactcacaggaaaaaaa

SEQ ID NO: 977 - DNA, 2069 bp, Mus musculus
ctggcccatggcagaggagctgctcctggagaggtgtgatttggagattcaggccaatggccgtgaccaccacacggccgacctatgccaagagaaactggtgctgcgtcgtggtcagcgcttccggctgactctgtacttcgagggccgtggctacgaggccagcgtggacagcctcacgttcggtgctgtgaccggcccagatcccagtgaagaggcagggaccaaggcccgcttctcactgtctgacaatgtggaggagggatcttggtcagcctcagtgctggaccaacaggacaatgtcctctcgctacagctctgcaccccagccaatgctcctattggcctgtaccgtctcagcctagaggcttctactggctaccagggctccagctttgtgctgggccacttcatcctgctctacaatgcctggtgcccagccgatgatgtgtacctagactcagaggaggagcgacgggaatatgtccttacgcaacagggcttcatctaccaaggctctgtcaagttcatcaagagtgtgccttggaactttgggcagttcgaggatggaatcctggatacctgcctgatgctcttggatatgaaccccaagttcctgaagaaccgtagtcgggactgctcacgccgcagcagtcccatctatgtgggccgcgtggtgagcgccatggtcaactgcaatgatgaccagggtgtgcttctgggccgctgggacaacaactatggggatggtatcagtcccatggcctggattggcagtgtggacattctgcggcgctggaaggaacacggctgtcagcaagtgaagtacgggcagtgctgggtgtttgcagcggtggcctgcacagtgctgcggtgcctcggcatccctaccagagtggtgaccaactacaactccgcccacgaccagaacagcaacctgctcatcgagtacttccgaaatgagttcggggagctggagagcaacaagagcgagatgatctggaacttccactgctgggtggagtcctggatgaccaggccagacctacagccgggctatgaggggtggcaggccattgaccccacaccacaggagaagagcgaagggacatactgttgtggcccagtctcagtgcgagccatcaaggagggagacctgagtaccaagtatgatgcacccttcgtgtttgccgaggtcaacgctgatgtggtggactggatccggcaggaagatgggtctgtgctcaaatccatcaaccgttccttggtcgtggggcagaagatcagcactaagagtgtgggccgtgatgaccgggaggacatcacccatacctacaagtacccagaggggtcacccgaggagagggaagtcttcaccaaggccaaccacctgaacaaactggcagagaaagaggagacaggggtggccatgcgcatccgagtgggggacagtatgagcatgggcaacgacttcgacgtgtttgcccacatcggcaacgacacctcggagactcgagagtgtcgtctcctgctctgtgcccgcactgtcagctacaacggggtgctggggcccgagtgtggcactgaggacatcaacctgaccctggatccctactctgagaacagcatcccacttcgaatcctctacgagaagtacagcgggtgcctgacagagtcaaacctcatcaaggtgcggggccttctcatcgaaccagctgccaacagctacctgctggctgagagagatctctacctggagaatcccgaaatcaagatccgggtcctgggagaacccaagcaaaaccgcaaactggtggctgaggtgtccctgaagaacccactttccgatcccctgtatgactgcatcttcactgtggagggggctggcctgaccaaggagcagaagtctgtggaagtctcagacccggtgccagcgggcgatttggtcaaggcacgggtcgacctgttcccgactgatattggcctccacaagctggtggtgaacttccagtgtgacaagctgaagtcggtgaagggttaccggaatgttatcatcggcccggcctaag

SEQ ID NO: 978 - DNA, 3328 bp, Mus musculus
actaggaacccgcagctctttatcctcagtttgcttccgtcaggcctcgcgtccacgcgggaggtgcgggacgccgacaccgcggggcgagaagagctggtggtttcaccttccttgttcatccgaacaaaaaaggccaacttcaaaagctgccaacaatgaatggctccaaagatccccctgggtcctatgacttcgacctgatcatcattggaggaggctcaggaggactggcagcagctaaggaggcagccaaatttgacaagaaagtgctggtcttggattttgtcacaccgactcctcttgggaccagatggggtctcggaggaacgtgtgtgaatgtgggttgcatacctaagaagctgatgcaccaggcagctttgctcggacaagctctgaaagactcgcgcaactatggctggaaagtcgaagacacagtgaagcatgactgggagaaaatgacggaatctgtgcagagtcacatcggctcgctgaactggggctaccgcgtagctctccgggagaaaaaggtcgtctatgagaatgcttacgggaggttcattggtcctcacaggattgtggcgacaaataacaaaggtaaagaaaaaatctattcagcagagcggttcctcatcgccacaggtgagaggccccgctacctgggcatccctggagacaaagagtactgcatcagcagtgatgatcttttctccttgccttactgcccggggaagaccctagtagttggtgcatcctatgtcgccttggaatgtgcaggatttctggctggtatcggcttagacgtcactgtaatggtgcggtccattctccttagaggatttgaccaagacatggccaacaaaatcggtgaacacatggaagaacatggtatcaagtttataaggcagttcgtcccaacgaaaattgaacagatcgaagcaggaacaccaggccgactcagggtgactgctcaatccacaaacagcgaggagaccatagagggcgaatttaacacagtgttgctggcggtaggaagagattcttgtacgagaactattggcttagagaccgtgggcgtgaagataaacgaaaaaaccggaaagatacccgtcacggatgaagagcagaccaatgtgccttacatctacgccatcggtgacatcctggaggggaagctagagctgactcccgtagccatccaggcggggagattgctggctcagaggctgtatggaggctccaatgtcaaatgtgactatgacaatgtcccaacgactgtatttactcctttggaatatggctgttgtggcctctctgaagaaaaagccgtagagaaatttggggaagaaaatattgaagtttaccatagtttcttttggccattggaatggacagtcccatcccgggataacaacaaatgttatgcaaaaataatctgcaaccttaaagacgatgaacgtgtcgtgggcttccacgtgctgggtccaaacgctggagaggtgacgcagggctttgcggctgcgctcaagtgtgggctgactaagcagcagctggacagcaccatcggcatccacccggtctgtgcagagatattcacaacgttgtcagtgacgaagcgctctgggggagacatcctccagtctggctgctgaggttaagccccagtgtggatgctgttgccaagactacagaccattgccttgcttccttgcccacgcccaggtgaagttcaggaaggctcttgggtcctaggcgccaattcaaggtgctgtcctaaggccaccgggtccctgggatcttgtgggtaggaggtggcaggtcgaaggaggctgcagcatcgcactggggtcaccatgacagactcagactgacatctggcagagcatcacaggcatgcgtccatgaagtcactggcctcaagcccaagtggtgggcagtgacagaagagctgccgggtctgttgagctcaaccttttcctgtagattgtcttagtctcactttcaagctgtctaatgtcaattctgttttttcttttttcctccatggggttaatgatactagagatagggaatattagcaatcagtttttgtcatggctggtccatctgcaacagtctttactgtgtggaagtgggtgagatggcttatgagagccaaaccaatttatccccagaaagacgaattaccctgtgactaaaatacactgtctgcttttactaactggtgtagcattgtctcctttaataagtcttgtgtccaaaacgagaaaaaccattggccacttttgcaagtttcctgcagtgtgcttagcaagggaggtggcgacttggctaatctacttgaactgcatcgcatggctcttgggtagcttagagcatcgcagggtagaggcagaccagcagtgagtgtctctcctggtacaattattgtctggttctcagtggaaaacgcttaatttgctttaaacttggtgtttttgtgaggtggatttagtcttaagctgtgtcccataagaactacattcacaggcaagtggctcttcctccacacagcctatacatcttctgaggtaattactttcataaggaagctgttcataacgtaagttattattattattgaacacaggtggatgtgaaggatttttcattgaaaaaccaaatggtttttctttttttctgttcagtgagcccacaggaactctgtcaggacagccagtactctgccggcatggctgctggggcgtttacggtgtagtttagctcctaggttacatgaccgtgaacatgctggctgaggactacacaaaccaggtttcccaccatacacggcctggccctgcagcttcttttcttgccctcccctttgcctgtccccacctgcagtactgagtggcgtttcacagtacccttctgggccacctcagggaagggatttgcctggtgtccagccagcagcacccaccctgccccacgaggctccctcacacctgcccccccgtccttgtgttgaagacagtgggaagaggagaaaggaccagggaaaccaagggagttgactgttcagttttatttatttattttttaagtttttttttcctttcaagtctgccagtctctgagatcagaacaacagacagtgtagggtaactaatcatgtgattctcttagtggaatgaaatgttctacccccacaagaaggagtatacgtcattgttcatattctgtaatcgcacaatgtattgtaatgcaaattccaattccatgtatttttattacaatttttctggaaaaaaatgtgaaccaataaaagatgttgatgcacaaa

SEQ ID NO: 979 - DNA, 1065 bp, Mus musculus
acgcggggagttcagagagcggtgtcctgctggcatctgctggtgccccacgctccaacccgagatgatggccagcaagcgagtggcgaaagagctggagagtctttcgaaggagctgccgccataccttcgccaactgtctagtgactatgccaatgtgcttgtgtggcacatgctcctgctgccagaccagcttccctatggcctcaaagccttccaagtgcggattgatttccccagggagtatccattcaagcctcccactttgagattcaccaccaagatctaccaccccaacgtcagggaggatggtctggtgtgcctgcccctcatcagcaatgagaactggaagccttacaccaagccttatcaagtcttggaggccctcaatgtgctggtgagtaaaccgaatctggaagagcctgtgcgtctggaacttgctgacctcctgactcagaacccggagatgttcaggaagaaggcagaagagttcacccttaaattcggagtggaccggccctcttaattctgttctgaagcctggatcgtctgctctagcagatggatatcaccgactggtgcccaaggccttgggaagctcaccctgtgcctaagttttcctttgtagttgctaattatgaatcttgtacctggtgtgtatgtatgtgacatggaggtgggggggcctgtgtgatgtgtgctccttccctgagctgtctggctgtagatgtaccatccccacatcctccttggcttcagagccagtgggagttaggtacacacagttcagctcttagctctctctgtcttaggccaacctttcaggccaattggcagaaattgatgcccagggccaggcaccaaggggtgagaaaggcaggactctgctcagaaggcagagcctacagaaggtaccaaatttactgttgagtgattgagatgaaagagtagtaaactcagtgctcaaggtatgctaatcataaaacagatagtgacattcctcaccaccacttctgagttcaaggagtttcattcaaagaagtcactgactttcttgaatgaata

SEQ ID NO: 980 - DNA, 2240 bp, Mus musculus
gcatctatctcaacaatttctctacaccggttccccttgctagggactttgggccacgaaagctctgggtttgtctgcctctgttttgtggctaaaagctgactctgggcacttcaaaaaagatggtttttgatcatcctgtgaaaaatgagccttggcctccagacctagtaaagtaaacctctttcccgtggagaacagtgctggctcctgaggacctggagggccaagcccagaaggattagccagaagcaggcttggttcctgctccgatcagtggctctcctgcccgtaccattcattatgattcataccaacttgaagagaaagttcagctgctttgtcctggtctttctcctgtttgccatcatctgcgtgtggaagaaagggagcgactatgaggctcttacattgcaagccaaggtattccagatgccgaagagccaggagaaagtggccgtggggcctgctccccaggctgtgttctcaaacagcaaacaagaccctaaggaaggcgttcagatcctcagttaccccagggtcacagccaaggtcaagccacagccctccttgcaggtgtgggacaaggactccacatactcaaaacttaaccccaggctgctgaagatctggaggaactatctgaacatgaataaatataaagtgtcctacaaggggccgggaccaggagtcaggttcagcgtagaaggcctgcgctgccaccttcgagaccacgtgaatgtgtctatgatagaggccacagattctcccttcaacaccactgaatgggagggttacctgcccaaagagacattcagaaccaaggctgggccttgcacaaagtgtgccgtcgtgtcttctgcaggatctctgaagaactcccagctgggtcgagagattgataatcatgatgcggtcctgaggtttaatggggcacctacagacaacttccaacaggatgtgggcacaaaaactaccatccgcctagtgaactctcagttagtcaccacagaaaagcgcttcctgaaggacagtttgtacaccgaaggaatcctgattctgtgggacccatctgtgtatcatgcagacattccgcagtggtatcagaagccagactacaacttcttcgaaacctataagagttaccgaaggcttcaccccagccagcctttttacatcctcaagccccagatgccatgggaactatgggacatcattcaggaaatctctccagatctgattcagccgaatcccccatcctccggcatgctgggtatcatcattatgatgacgctgtgtgaccaagttgatatttacgagttcctcccatccaagcgcaagacagatgtgtgctactatcaccagaagttctttgacagcgcctgcacgatgggtgcctaccatccgctcctcttcgagaagaatatggtgaagcatctcaatgagggaacagatgaagacatttatttgtttgggaaagctaccctgtctggcttccggaacaatcgctgttgagccaggcatcctcatccttctccataagtcattttatggctgctctcctggttaccactgcttgaaggagtgtttttattcaacaggcccagcctgcctcttgcactctagggaattttgttggcgagggttctggggcctccagtgtctgatggcaaggaggcagacccagccttccctgcaggcacagagtatgggagcccagattcttcccgtacacatttctcctgacaacatcctcctctcctttcacatgagtaggggaaagagccacatttctcaccagggttgccaaaactagactttgttttttccaactgaatgatgtcatcctaacaagggagcaccttccgtggcttaaatctctccctaggtggtgatttcacatctcccagatcatgatttgtgtcagatgcagggtggcttcagggaggggaggcaattaattgggacacggtggggaagcctactcagttactctagagtaaagttgttcccagggcagtcccttttgatccttaatcctgggtgcttatgatcttgcaaaggatcttgggtagctcacttcccactctccatggagacagaaggtccaaaacctcccatctgtccccaacctgatcagagttgagttatatatagatacacccaacaggcagctagaatgcaaacattccgtgcgctcagttatttgggctccctctctgagagcgtgctgtctgtac

SEQ ID NO: 981 - DNA, 1685 bp, Mus musculus
tgcattgcaatgtgaagtgttcctgaataaacctgcttgaagaaggacaacgtggtgttgcgtctttcctgctggtcggggtggaatagacacctcccctttttaacttgggtgacctcatgaacataaaagaacttaaaggtagcaagccatggacttaaagtaggctgaccttgaactcagagatcttcttggcaatgtctctggagattaaagtaattggcaactggagatactcatgttccagtaatcaagagggagccttgctgctacttcatgatccaggcgcgtgtggcccagtgaagtccctgagctgtacagcatgaccttgctgctcctgggtgcggtgctgctggtggcccagccccagcttgtgcattcccacccggctgctcctggcccggggctcaaacagcaggagcttctgaggaaggtgattattctcccagaggacaccggagaaggcacagcatccaatggttccacacagcagctgccacagaccatcatcattggggtgcgcaagggtggtacccgagccctgctagagatgctcagcctgcatcctgatgttgctgcagctgaaaacgaggtccatttctttgactgggaggagcattacagccaaggcctgggctggtacctcacccagatgcccttctcctcccctcaccagctcaccgtggagaagacacccgcctatttcacttcgcccaaagtgcctgagagaatccacagcatgaaccccaccatccgcctgctgcttatcctgagggacccatcagagcgcgtgctgtccgactacacccaggtgttgtacaaccaccttcagaagcacaagccctatccacccattgaggacctcctaatgcgggacggtcggctgaacctggactacaaggctctcaaccgcagcctgtaccatgcacacatgctgaactggctgcgttttttcccgttgggccacatccacattgtggatggcgaccgcctcatcagagaccctttccctgagatccagaaggtcgaaagattcctgaagctttctccacagatcaacgcctcgaacttctactttaacaaaaccaagggcttctactgcctgcgggacagtggcaaggaccgctgcttacacgagtccaaaggccgggcgcacccccaggtggatcccaaactacttgataaactgcacgaatactttcatgagccaaataagaaatttttcaagctcgtgggcagaacattcgactggcactgatttgccgtctcctaggctcgggacttttcctgttgttaacttctggtgtacatctgaaggggggaggaaaataattttaaaaaggcatttaagctataatttatttgtaaaacccacaaatgacttctgtacagtattagattcacagttgccatatatagtagttatatttttctacttgttaaatggagggcgttttgtattgtttttcatggttgttaacattgtgtatatgtctctataatatgaaggaacttaactattgcactgaaaaaataagagattttttttttctggagacctctttttttgttgttgttgttttaaatataattaacctgcctccaatccaaaatagctctttgttttcacctccttgtcaaatctataatctttttctgcttaaaaaatttattggtattatgga

SEQ ID NO: 982 - DNA, 353 bp, Mus musculus
tttttttttttttttttggttctagggcacttctattcttcgtttacaactccaccccctttggcagatgtgtaaacgaagaatagaagtgccctagaagcaaaggaaggacgaggacagctcacgcagcgactttcccactctgcccatggggtcatctgtgtctctcactggggactccgcggaaatgagtcaggcatcccttctttggctggggactgactggcagggataacagggctccattgggaaactgctttttttagggctttattctctgatctaactcatttcctgcagggacagtcagcatctcagctagaagcaggtatcagaactgaggggggcgggga

SEQ ID NO: 983 - DNA, 1942 bp, Mus musculus
cgcgcgagaccggtgccgcggtacttaacttcgcagccccgggtgtcggaggtagccatgcagagcgcacccttggagcagccagctaagcgaccccgctgcgatggcagcccaaggacgccaccgagcactcctcctgcaacagctaatctgtctgcagacgacgacttccaaaacaccgacctccgaacctgggaaccggaggacgtgtgctccttcttagagaatcgtggtttccgagagaagaaagtgctggacatcttcagagacaataaaatcgccggctcgtttctgccctttttggatgaggatcgtctggaagatctgggagtaagttccttggaggagaggaagaagatgatagaatgtatccagcagctgagtcagtctcggattgatctaatgaaggtatttaatgatcccattcatggccacattgagttccaccctctccttatcagaatcatcgacacacctcagttccagcgacttcgctatatcaagcagctggggggcggctactatgttttccctggagcgtcccacaatcgcttcgaacacagtctcggagtggggtacctagcaggctgcctggtgcgagcacttgccgaaaaacagccagagctacagatcagtgagcgagatatactctgtgttcagattgcggggctctgccacgacctaggtcatgggccattttctcatatgtttgatggaaggtttatcccacgggctcgcccagagaaaaagtggaagcacgaacagggctccattgagatgtttgagcatctggtcaattctaatgaactcaaacttgtcatgaagaactatggtctcgtccctgaagaagacattacctttatcaaggaacaaattatgggaccacctataacaccagtcaaagattccttgtggccgtataaaggccgccctgccacgaagagcttcctttacgagatagtgtctaacaagaggaatggcatcgacgtagacaaatgggattattttgccagagactgtcaccatcttggaatccaaaataattttgattacaagcgcttcattaagtttgcccgtatctgtgaagtggagtacaaggtcaaggaggacaagacctacatccgtaaggtgaagcacatttgttcgagagaaaaggaggttggaaatctgtatgacatgttccacactcgcaactgcttacaccgaagagcttaccaacacaagatcagcaacctcatcgacataatgattacagatgccttcctcaaagcagacccctacgtggagattacagggactgccgggaagaagttccgcatttccacagccattgatgacatggaagccttcactaagttgacggataacatttttctggaggttttacactctactgatccacagttgtctgaggcccaaagtattttaaggaacattgaatgccgcaatctatacaagtatttgggtgagacccagccaaagcgtgagaagattaggaaggaagaatatgaacggcttccccaagaagttgctaaagccaaacctgaaaaagccccggatgttgaactgaaggccgaagatttcatagttgatgttatcaatgtggattatgggatggaagacaagaatccaatcgatcgtgttcacttctattgtaagagcaacagcaagcaagcggtcaggatcaataaagagcaggtgtcacaactgctgccagagaaatttgcagagcagctcattcgggtgtactgtaagaagaaagacgggaagagcctggacgcgcgggaagcactttgttcagtggtgtgcgctcagggacttcaccaagccacaggatggtgacattatagctccactcataacacctctgaaatggaataataagacttcatcttgcctccaagaagtatccaaagtaaaaacatgtctaaaattttaagtg

SEQ ID NO: 984 - DNA, 233 bp, Mus musculus
tgctttccatctcaatgttccttaaaagactcaccctgaaccaaggtatattttccatttatttattatatattcacttcaagaagtcactgtcagagaagtgaagagtcatcttaagtattatattagaggatttcctttggaccaccggaaggaggtgtgcccagagccaaggacttcagctttggtttggaaaaatcctgctgtaccatattaaacatacaaaggatgcc

SEQ ID NO: 985 - DNA, 705 bp, Mus musculus
gtggagttgtacttcgttttacaggtaaatttcaaggcacagtcagtttttaagaaagtgctccaagaccctaggcaacgtgacagttctcagttccctctgaattttagtctctgctacctggtgctctttaccaaaggagctcgctgcagggtgaaattcaggcgtgttctgcccaggcctgctgtcttgagtacaaatgtgaatgatggactgactgcttgttgccaaactggaaatgttttgtagggatttactggcatggtatcattcctaggaagaagaagaaaaaaaaaaggaaaaagaaagaaagaaaaagggacaggagagggagagaaacttgactgcacattttttttttattattaaatccatgttgtgacttttatttaatttctatattttttggtaataaaaagttgactttttaatttgaatttgtctttttttatttattggtctgaaaggcatttcaaaggtattataataatatattggtgtaatttaattggtgcagcatgccttctgggctccagtcaaagttagtttttaacttatttgattggtttgagaacagcctacagggagaggaagagaagagctggctaattaccccaaagtgttcatctttcattggaaactgaatttttatcatttttgtttctgtttttattttaaattaaataaattgcaacaaactgaacc

SEQ ID NO: 986 - DNA, 454 bp, Mus musculus
agcggccgctagtccctacttccgcgccatgttcgcgggccagctgcgcgagagccgcgccgagcgcgtgcgcctgcacggggtgccgcccgacatgctacagctgctcctggacttcagctacaccggcagagtggcggtgagcggcgacaacgccgagccgctgctgcgcgccgccgacctgctgcagttccccgccgtgaaggaggcgtgcggcgccttcctgcagcagcagctcgacctggccaactgcctggacatgcaggacttcgccgaggccttcagctgctcggggctggcgagcgctgcgcaacgcttcatcctgcgccacgtgggcgaactgggcgccgagcaactggagaggctgccgctggcgcgcctgctgcgctacctgcgcgacgacgggctgtgcgtgcccaaggaggaggcggcctaccagctggcgctgcgctgg

SEQ ID NO: 987 - DNA, 728 bp, Mus musculus
gagctgggggggggcaggggggggagagtcgatccagtctctgactgtgagagcaagcagccagaagcagactccttaattccaggggacctagagctagagcctgcagcaatggcctgggacctaaaggtgaagatgctggggggtaacgatttcctggtgtccgtgactaactccatgacggtgtcagaactgaagaagcagattgcccagaagattggtgtgccggctttccagcagcgcctggcccaccaaactgcagtgctccaggacggtcttaccctttccagtctgggtctgggtcccagcagcacagtgatgctagtggtacagaactgcagcgagcctctgagcatcctggtgaggaacgaaaggggccacagcaacatctatgaggtctttctgacgcagactgtagacacgcttaagaagaaggtgtccagcggaacaagtcacgaagaccagttctggctgagcttcgagggaaggcccatggaggacaaggagctgctgggggagtatggcctaaagccccagtgcacagtgatcaagcatttgcgcctgaggggtgggggaggggaccagtgtgcctaaggcccccatccagagccagtgttggttataaaagatgatgggggggggggtatggaggacttttgggatagcattggaaatgtaaacgaggaaaatacctaattagaaaaaatatcaaaaaaaaaaaaaagctc

SEQ ID NO: 988 - DNA, 2101 bp, Mus musculus
caaggcaggtttctgaggagttctgctctgctgaaaacccagagaacagctaccacctttacagcaaccatgggagagaatgctgatggtgaccaggtcatggagaatctgcttcagctgagatgtcacttcacatggaagctgctatttgaaaataatgacatacctgatttggaagtgagaatctcagagcaggtccagttccttgacatcaagaacccattggggatgcacaacctcctggcctacgtgaggcacctgaaaggccagcaggacgaagccctgcagagcttgaaagaagctgaagccttgatccagagcgagcagctgagcaagagaagcctggcgacctggggcaactgtgcctggctgcattaccacaggggcagcttggcagaagcccaggtctacctggacaaggtggagaaggtgtgcaaggaattttcaagtcccttccgctacaggctggagtgtgctgagatggactgtgaggaaggctgggccttgctgaagtgtggaggaggaaattataaacaagccatggcctgctttgcgaaggctctgaaagtggagccagaaaaccctgagtacaacactggctatgcagtcgtagcctatcgccaagatttagatgacaactttatttctctagaacctttgaggaaggctgtccggttaaatccagaagatccataccttaaagttctccttgccctaaagcttcaggatttaggagaacatgttgaagcagaagcacacattgaagaagccctcagcagcacatcttgccaaagctatgtcattcgctatgcagccaaatatttccgtaggaaacatcgcgtagacaaagctcttcatcttctaaacagggccttgcaggcatcaccttcctctggctacttacattatcaaaaagggctctgctacaagcaacaaatctcccaactgaggacatcccgaaacaggcagcccagaaggcaggacaatgtgcaagaattggcacaacaggccattcatgaatttcaagagactttgaaactgaggcccacatttgagatggcctatgtttgcatggctgaagtgcaggcagaaattcaccagtatgaagaagcagagagaaatttccagaaggcactgaacaacaagaccctcgtggctcacatagagcaggatattcacctccgctatggccgtttcctacagtttcataagcagtcagaagacaaggcaatcaccctctacttaaaaggtctaaaagtggaagagaagtcctttgcttggaggaaactactgactgctttggagaaagtggctgaaagacgtgtttgtcagaatgttcatcttgtagagagtaccagccttcttgggctagtctacaaactgaaagggcaagagaaaaatgctctgttttactatgagaaggcactgaggctcactggggaaatgaaccctgcattctgaatgcagctcacctctgtgacgttaatatactcacaaccaagtgttccaatgctccttccagatttcttttcccaggtctgttttgttgttgttgttgttgttgttgttgttcgttttctttctgaaatgccaagtagcaaggtacattttctcctgtgacttctttctggtctttctgatcctgtctagcaggcaattccatcccaaggatacatactcacttaaagatcacaactgattcctgctgttctggactcctgtgagctgtagaatcacacaacctttttccttatgtctgtgcctttggaacagatatcttccaccttttgctaatgtcctggacaaaaaagtctttgccaaagaaggtatctttttttctttttaatgtcaccagaaatgcttattaccatacaatttcagagcaaaacaaatgagcaaagaagaaagtttgaaagcaaaagaggtcacacattactggaaagatactaagaaccaagaagacttttggcttcctagagaattaaaatgaaaaccctccttaggtagtaaagtctgaaaattacataaataacttctttcaatatttatatgctaaaagtattcattgaaagtgaccaaaagagctaaagccaaaaccaac

SEQ ID NO: 989 - DNA, 546 bp, Mus musculus
atggcaggcatcccagaggtggtggccatggactgtgagatggtggggcttgggcctcaaagggtgagtggcctcgcccgctgcagcattgtgaacatccatggcgcagtcctgtatgacaagtacatccgacccgagggagagatcacggactacagaacccaagtcagcggggtcacgcctcagcacatggtgagggccacgccatttggtgaagccaggctagagatcctgcagcttctgaaaggcaagctggtggtgggccatgacctgaagcacgacttcaatgccctgaaggaggatatgagcaagtacaccatctatgacacgtccacagacaggctgctgtggcatgaggccaagctgcagtactacagccgagtgtccctgaggctgctgtgtaagcgcctgctacacaagaacatccagaacaactggcggggccactgctctgtggaagatgccagggccacaatggagctctacaaaatctctcagcgactcagagcccagcgagggctgccttgccctgggacgtcagactga

SEQ ID NO: 990 - DNA, 1196 bp, Mus musculus
cctatcaccatggggatgctggtgcccactgctctagctgctcggctgctgagcctgttccagcagcagctgggttccctctggagtggcctggccatcctgttctgctggctgagaatagcattagggtggctagatcccgggaaggaacagccacaggtccggggtgagctggaggagacccaggagacccaggaagatgggaacagcactcagcgcacaacccccgtgagtgtcaactaccacttcactcgtcagtgcaactacaaatgtggcttctgcttccacacagccaagacatccttcgtgctgcccctggaggaggccaagcgaggactgcttctgctcaaacaggctggtttggagaagatcaacttttctggaggagaacccttccttcaggacaggggtgaatacttgggcaagcttgtgagattctgcaaggaggagctagccctgccctctgtgagcatagtgagcaatggcagccttatccaggagagatggttcaaggactatggggagtatttggacattcttgctatctcctgcgacagcttcgatgagcaggttaatgctctgattggccgtggtcaaggaaaaaagaaccacgtggaaaaccttcaaaagctgaggaggtggtgcagggattacaaggtggctttcaagatcaactctgtcattaatcgcttcaacgtggacgaagacatgaatgaacacatcaaggccctgagccctgtgcgctggaaggttttccagtgcctcctaattgagggtgagaactcaggagaagatgccctgagggaagcagaaagatttcttataagcaatgaagaatttgaaacattcttggagcgtcacaaagaggtgtcctgtttggtgcctgaatctaaccagaagatgaaagactcctaccttatcctagatgaatatatgcgctttctgaactgtaccggtggccggaaggacccttccaagtctattctggatgttggcgtggaagaagcaataaagttcagtggatttgatgagaagatgtttctgaagcgtggcggaaagtatgtgtggagtaaagctgacctgaagctggactggtgaggctgagatgggaaggaaactccgaccagctacagggacattcacgcccagctatccttcaacaagctacatcttctggctgtctacagactgttgtt

SEQ ID NO: 991 - DNA, 2667 bp, Mus musculus
gagcatgcccacgtgggtcgtctgcagaaatgagacgaaggagcgccaagtagcctcacggctctgagcttattctctccagcccttcatctgggtatctacagtgatttctcttctggaccctacctcagagagcacttgtcaaccgcctagtgaacacaccattactatcctgtgccattgccatagagagacctcagccatcaatcactagcacatgattgacagacagagaatgggactttgggctttggcaattctgacacttcccatgtatttgacagttacggagggcagtaaatcgtcctggggtctggaaaatgaggctttaattgtgagatgcccccaaagaggacgctcgacttatcctgtggaatggtattactcagatacaaatgaaagtattcctactcaaaaaagaaatcggatctttgtctcaagagatcgtctgaagtttctaccagccagagtggaagactctgggatttatgcttgtgttatcagaagccccaacttgaataagactggatacttgaatgtcaccatacataaaaagccgccaagctgcaatatccctgattatttgatgtactcgacagtacgtggatcagataaaaatttcaagataacgtgtccaacaattgacctgtataattggacagcacctgttcagtggtttaagaactgcaaagctctccaagagccaaggttcagggcacacaggtcctacttgttcattgacaacgtgactcatgatgatgaaggtgactacacttgtcaattcacacacgtggagaatggaaccaactacatcgtgacggccaccagatcattcacagttgaagaaaaaggcttttctatgtttccagtaattacaaatcctccatacaaccacacaatggaagtggaaataggaaaaccagcaagtattgcctgttcagcttgctttggcaaaggctctcacttcttggctgatgtcctgtggcagattaacaaaacagtagttggaaattttggtgaagcaagaattcaagaagaggaaggtcgaaatgaaagttccagcaatgacatggattgtttaacctcagtgttaaggataactggtgtgacagaaaaggacctgtccctggaatatgactgtctggccctgaaccttcatggcatgataaggcacaccataagactgagaaggaaacaaccaagtaaggagtgtccctcacacattgcttgaataaattggctgaatcagctgtgcactgcatccgttttctccgaggactgtgtgttgtagcttggtcccagggaatccatcatgatcaagggaatagttggcctgtttcatcaagtgttctcacgttgaggaagctccttaaatctggtctttccagaatgtttctgtcttccaacaggaatctctgtcattgtatccttcccctctctgtgtcccctcctccttgttctcccggcagtcctccccatctcctcacctcccttaatgtgttcttgacccccttctctcttttccttctctctgggctccttctcacccaatagtggcttttgcagtcatcctttgtaccgactacaagggacattggtattggtagtgggttcagagcagtaataactctgctgtgtctctttgtataaccttgtcatggaaaacaacttacaaactttcattctgagcagttattaattcccttgcttggtccttgggttgacaggtgcagccatcatgatagatagatgaccaacctgatccgattttaaaagagtaaacatcttttttacccttatcactctcttatgatactgaccactgccttactggcaatacaactaatatgaaaacatttttaatttctttcaaatatcaagagggcatgggagggagagagacactaactctaagatcatagcaatatgtggggcatttatttggatgaatatattgattaaaagggtagggtggaggtacctattagattcagtcatgctgtgtctctgcctgaagtggtatttgggatttttgttgattctgtttgtcttcttttgtttgtttttactatagaaactattctgcccttgtaatcctagagtcacctgtctttgcctcccagttactgggactaaagctatgtgtcaccttactgagccagggtgtttcttgttttggttttgattttagagcctctggcttgtaacatttttataaaacagaattttgattcctaggtggccagagttgtgactcatagagggatttttgtgctgttgtgatcagtgaggtcttggggatctgcccctgataatggtgttactccgggtgactgtggaccacagcactgtgttcccagatggtggtggtcactgcacattctgcaggaaaagagaatccaaacccctattctcacccagtttgaccttgattccacaatgccttcctctgtaacaggatcttttgtctagatttctgagtgtactttagttcacgtttgtattagaattatattttttaatcagtaattttgtatttgttttgtttgtgtgtgatttctttgttttccagtttatttttaattcacttgttgctattcaaatcaatgtgttcatactgtttgaacaacacagcgtattaaataaaattcgtgtctattgttcttg

SEQ ID NO: 992 - DNA, 640 bp, Mus musculus
tggttttgatgcgcacctttaatctcagcagttggaggcagagacaggcagcttggatttacaggccagcctggtctacagagggaacgtctggaatatacagagaaatctagtctcaaatgaaagagagagagagagcgcgcgcgtgcacgagcgagccatgggaaagccagtgtcaaggtctgcgttctgccctctctctcagctatcttgaagtaaagaagaccatcacaccaggttggcactttgaccgttcttggtagcattaggcagtaagtgatcctagtccccagcaggtggacatgcaggcctagcttgactcggaagtgaagatagccaggccctgctgccctgaaggcacaactgtcagggcctccacctccccgcccccacgagtgggcttctggaagtggatctcaaggatgtcatgcagttcctgtgcatccatgacatcaggaatatttgtcaccagcactgaatgaggggcttgctggaatttgatctcagctgtctggatctcaccactcacatagggagagaccctcaggaggacctgctgcctgtccagtgggactctgaactggccaatctggcataagtagctggccacttcttcatcagcgaacactaacatgacggg

SEQ ID NO: 993 - DNA, 649 bp, Mus musculus
gaggaaaaggaaacttctgagaaaccgaaactgccgcagaaagggcagacccgcagcgcgctccatcctttgcccttcagtgctgcctttgctccgcaccatgaaccacacttctcaagccttcatcaccgctgccagtggaggacagcccccaaactacgaaagaatcaaggaagaatatgaggtggctgagatgggggcaccgcacggatcggcttctgtcagaactactgtgatcaacatgcccagagaggtgtcggtgcctgaccatgtggtctggtccctgttcaatacactcttcatgaacttctgctgcctgggcttcatagcctatgcctactccgtgaagtctagggatcggaagatggtgggtgatgtgactggagcccaggcctacgcctccactgctaagtgcctgaacatcagcaccttggtcctcagcatcctgatggttgttatcaccattgttagtgtcatcatcattgttcttaacgctcaaaaccttcacacttaatagaggattccgacttccggtcctgaagtgcttcaccctccgcagctgcgtccctccttgcccctccctacacgcaggtgtaacactcatttatctatccacagtggattcaataaagtgcacttgataaccacc

SEQ ID NO: 994 - DNA, 747 bp, Mus musculus
atgtcctggtctccgatcctaccatttttgtcccttctgcttctgctgttcccactcgaggttcccagagcagccactgcgtccctttcgcaagcatcctccgaaggcacaaccacctgcaaggtccacgatgtgtgcctcttggggccacgcccattgcccccttcaccacctgtcagagtcagcctgtattatgagtccctgtgtggagcttgtcgctacttcctcgtccgggatttgttcccaacctggctgatggtgatggaaatcatgaacatcaccctggtgccctacgggaatgcacaggagagaaatgtcagcggtacgtgggagttcacgtgccagcacggggagctggagtgtagactgaacatggtggaggcctgtctgctggataagctggaaaaggaggcagcgttcctaaccatcgtctgtatggaggagatggatgatatggagaagaaactgggaccgtgcctgcaggtgtatgctcctgaggtgtcaccagagagtatcatggagtgcgccacaggaaaacggggcacacagctcatgcatgagaatgcccagctcacagatgccctacacccaccccacgagtatgtgccctgggtgctggtcaatgagaaacctttgaaggaccccagcgagctcctgagcatagtctgtcagctgtaccagggaacggagaagccagacatctgctcctccattgccgactcccccaggaaggtctgctataagtaa

SEQ ID NO: 995 - DNA, 239 bp, Mus musculus
tgctggcagaacctgtttgtggagagtttttcctcaacctcacatttttcacggactaaacgtgatcatagacaaatctcttaacttcccagggccttgaatttgtatcttaagaagaagtggttgagctggcctttgaagttgtaactttttaaaattattcatcaaagtttaagatggttaatttcatatgtgctttttgctaatgtgggtataaactggcatagatgtgtgttttt

SEQ ID NO: 996 - DNA, 467 bp, Mus musculus
  misc_feature (334)..(334): "n" = a, t, g, or c.
tttttttttttttttttcagttttaataaaaggtctgtgacctgtagtagtagctgttagctgccctctccccactcctgcctttcctcttctctgcttctctgtattgctttgttgttttgcctgtgaggaggtattgctgtctatcctatggtcctgcaaccataggaaagaaaatccctgtggttggttcaggtttgtccccaccatcccctttcaaagaacgtgacacatactcgccctgccattctgcagagtacaaatcataaatgagtaagtttgctctttgggttgggggaaggggcagggtttcatttcctggtgttcccattanaatacaggataagaagagatcactaggggctttcagcaaaagtcaacatctagagcacttactggcctgttttccatgcgagctccttttcctctggactgtattttcctacagctttcactaaattacagga

SEQ ID NO: 997 - DNA, 561 bp, Mus musculus
ttcaacaggatctcaaaattttaatttaaaattaactaataaatcacaattctatattgctttaaagattattctgtttaaaaatgacacatctcaaaattaaccattacgattaactattccaggttagtttgtccaggtcaggagagaataaagcacagtgcagctcccttaaccttggagtcaggtttgaatgacagagtccgtcgccagcaatggacatgtaaataaccatccaagaaattctaaggacaaaccccagactgcttctgtgtggacaagccggtgtggagtcacagcctaaggaggggcagcagcctgtgtccccggtgctctcgaggattgaggatggagcaccttcttaagcagtgccaccatgtagctggctttcttctatgctggcagcactgtcatcacaatctatccagacagcggctcacaaacaacactcacagccagaactcaagaggcagcctagcttcccaccacaaagaaaccactttattcctgtaatttagtgaaagctgtaggaaaatacagtccagaggaaaaggagctcgc

SEQ ID NO: 998 - DNA, 3703 bp, Mus musculus
aactccggacttcggaagagcagtcgggtgctcttacccactgagccatctcaccagcccaccatgcaactcttataaggacaacatttaattggggtcggcttacaagtcagaggttccgtccattattataaaggcaggagcatggcagcatccaggtaggcctggtgcaggaggagctgacggttctacatcttcatctgaaggctgctcgtggaaaactggcttccaggcagctgggatgagggtcttaaagcccacgcccacagtgacacacctactccaacctgaggccatacctccaaatagtgcaactccctgggccaagcatattcaaaccatgacaggatctatattcagaatgtgcatttaacctttatttgtgttttttctttattctagaagcctccccagctttctgaggatgctaaccagctgagaagcaagcaagacaactgtggtgacagtcgcctggagcctgccgccagctctctctccccagatcacaaaaacatggaaattggggtgtccgtggcagaatgtaaaagtgtacctggagtcacctctaccccccattccaaggaccactcctcccctttctattcgccctcacacaatggcctcctcgctgatcaccacgagtctttagacaacgatgtcgccagagagatccagtacctagatgaagtgctggaggccaactgctgtgattcctctgtggatggaacttacaacggaatctcctccccagagcctggtgcagccatactggtaagcagcttaggctcgcctgcccactcagtcaccgaggcagaacccactgagaaagcatccggtaggcaggtgcctcctcacatcgagctcagtagaatcccctccgacagaatggctgaaggagaaagagccaatggacactccactgaccagccccaagacctgctggggaacagcctgcaggcacctgccagccccagttcctctaccagctcccactgctcctcccgagatggggagttcacactcaccactctgaagaaggaggccaagtttgagctgcgtgccttccacgaggacaagaagccctccaagctctttgaggaggacgagcgcgagaaggagcagttctgcgtccggaaagtgaggccctccgaggagatgatagagctggagaaagagcggagggagctcatccggagtcaggctgtgaagaagaatccaggcatcgccgccaagtggtggaatcctccccaggagaaaactattgaggagcagctggacgaggaacatctggagtcgcacagaaggtacaaggagcgcaaagagaaaagggcccagcaggagcagctacagttgcaacagcagcagcagcaacagctgcaacagcaacagctacaacaacaacagctgcaacagcaacagctgcaacaacagctgcaacagcagcagctgtccacgtcccagccctgcacagccccagctgctcacaaacacctagatggcattgaacacacaaaggaggatgtggtcactgagcagattgacttctcggctgcacgcaagcagttccagctgatggagaattccaggcagacactggccaagggccagagcacaccaaggctgttctctatcaagccttactacaaacctcttggatccatccattcggacaagccaccgaccatcttgagaccagctactgtcgggggaactctggaagacggcggcacacaggcagccaaggagcagaaagctccctgtgtatctgagagccagtctgcaggagccggtccagctaacgctgccactcagggaaaggaagggccatacagtgagccttcgaaacgcgggcccttatctaaactgtgggcagaggatggagagttcacaagtgcccgggccgtcctaactgtagtcaaagatgaagatcatgggattttggaccaattttcaagatcggtcaatgtatctttgactcaggaggagctggactcagggttagatgagttgtcagtgaggtcacaggataccactgtcctggagactctgtccaatgacttcagcatggacaacataagtgacagtggagcttctaacgagacaaccagtgcccttcaggaaaactcgctggctgatttctctctgcctcagaccccccaaacagacaacccctccgagggccgagaaggggtctctaagtcattcagtgaccatggtttctattctccttcctccacattgggagattctccgtccgttgatgaccccttggaatatcaggctgggctcctggtgcagaatgccattcaacaagccatagccgagcaggtggataaggctgaggcgcacaccagcaaggaaggatcagaacagcaggagcctgaagcaacggtagaggaagctggaagccagacacctggctctgagaagccccagggcatgtttgcaccacctcaggtgtcctctcctgttcaagagaaaagggatatattaccaaagaacctccctgcggaggacagggcactcagggaaaaggggccctcccagccacccacggctgcgcagcccagcggtccagtcaacatggaagagaccaggcctgaaggagggtacttcagcaagtattcagaggcagctgagctgagaagcacagcctccctcctggcgactcaagagtctgatgtcatggttgggcccttcaaactgaggtcaaggaagcagcggactttgtccatgatcgaagaagagatccgggcagcccaggaaagggaggaggagctaaagcggcagagacaagtgaggcaaagcaccccaagccccagggccaagaacgccccatcgctgccttctaggaccacctgctacaagactgctccaggtcctggaggccacacgggttaatcggaggaagagtgcttctggccttgcgctgggaggcagggatttacgctaaccaggaagaggaggacaacgaataaactgccttcagcccaggaaacttctctgctgaaggaatttctgcagagaaaccaggaaattattgaatcagaagcattttaatagactacttattaaagtgcatacaaactcaacaaccctcatgtagaccagaagctgcaatacaccatgataaaaaaacaaaaaacaaaataaaaacaaaaaaaacaaagaagcaaagcgaagcaaacaggatgttcacccatcaaactgagaccaggggcagaagagaaaggatatctttgtgactcaaagaagcccctggctttggactattccacaactgatccaaagggacacagatgtgacaaaggagtcaatatagttgctgcaggcagaactgaaggcagccttggatgggtgttgcagaggagcaggcagtgacatggccattccaaggcaacccgcagggtccagcctggtgcacccgctgcgctccggctatcctccacatcagcttcccatcccggtctcacctgaggcatcagaagtgttgggttgactccattttctccagcagccataaaaatgaatggtgtttctttccataattgccccaaagaggggaagtggggattcaatcgctcttacatgtagtcatttgaagttggggacacctaatggtcacaatatataaagtccgtatttttaaggcaatatctcttcatgttgcagatgcaatcaattctacagcaggaggttgaga

SEQ ID NO: 999 - DNA, 1695 bp, Mus musculus
gaattccggaccaaagttttcactctacacgtggtcccgaataagagcacacagtctaaacacagtgaaacagagttcactggctgagcctgtctctccatctaaaagacatgagactccagcatcttctgtaactgaggctcttgacaggaggttgggggattctagctcagccccactgcttgtgactcaatcagaaggaactgacctggtagtagaactcagaaccctcagaaccacttgctgctttcccaggaaggccacagtgcccgttctctccatcgtgaggtggccagaacaggaagtcatcagattcccaccgactcccaggactcctcctccagacttgcagtaggcagtagaaacagttgctcttctccactgagagaactgtcagaaaaactaatgaaaagtatagaacaagatgcagtgaatacttttaccaaatatatatctccagatgctgctaagccaataccaattacagaagccatgagaaacgacatcatcgcaaagatttgtggagaagatggacaggtggatcccaactgtttcgttctggacacggctgtagtctttagtgcaatggagcaagagcactttagtgagtttctgcgaagtcaccatttctgtaaataccagattgaagtgctgaccagtgggactgtttacctggctgatatcctcttctgtgagtcagccctcttttatttttctgagtacatggaaaaagaagatgcagtgaatatcttacaattctggttagcagcggataatttccagtctcagcttgctgccaaaaagggccagtatgatggacaggaggcccagaatgatgccatgattttatatgacaagtacttttccctccaagccacacacccccttggatttgatgatgttgtacgattagaaattgaatctaatatctgcagggaaggtggaccacttcctaattgtttcacaactccattacgtcaggcctggacaaccatggagaaggtctttttgcctggttttctgtccagcaatctttattacaaatatttgaatgatctcatccattcagttcgaggagatgaatttcttggagggaatgtttccctggctgctcacggctctgtctgccttcctgaggagtctcactcaggtggttccgatggctccactgctcagtctagtgtgaaaaaagccagtattaaaattctgaaaaattttgatgaagcaataattgtggatgctgcaagtctggacccagaatctttatatcaacggacatatgcagggaagatgtcctttgggagagttagtgatttggggcagttcatccgagagtctgagcctgaacctgatgtgaagaaatcaaaaggattcatgttctcacaagctatgaagaagtgggtgcaaggaaatactgacgaggcccaagaagagctagcttggaagattgcaaaaatgatagtgagtgatgttatgcagcaggcacaccatgatcaaccactagagaagtctacaaagctatgactcgaaaccagagataaggaaatctgattttgaaaaaaataagaactttcccctttggttggattcttcaacacagccgatgaaaacggagaactgcatttcttttcactgctagatcactgtgttccaggaaagagtgggagacagtccgagagtggttgttaaatgtag

SEQ ID NO: 1000 - DNA, 440 bp, Mus musculus
cggccgctccagctcccggccctgcgtgatacactcgatcgcctcagtgttggagagctggtaccagggctgctttccataggtgaagatctcccagagcaccaccccaaagctccacacatcgctctcggtgctgaacttgcggtagaggatgctctcgggtggcatccagcggatgggcagcatggtccgacctcccactcggtaatagtctgtgctatagatgtctctgctcatgccaaagtctccaatcttcaccactagtccctgacccaccagacagttgcgtgtggccagatcccggtgcacaaagtgcaggctggctagatataccataccagcagccacctggctagccacagccagaagctgcccaaggcccagaggaccaggagccacatcctcaccaccagccagcagctttgcatcagcctcgtgcc

SEQ ID NO: 1001 - DNA, 2901 bp, Mus musculus
atggttaactccagacgcgtgcagccgcagccgcccggggacgcgggacgctcgcccgcgccgcgagcgtccggacccgggcgcctggtggcgggaggcgccggcctagctgtccccggcggcctcggggagcagcggggcctggagatcgagatggagcgcatccggcaggcggccgctcgggatcccccggccggagcctcggcctcgccgtctcctccgctttcgtcctgctccaggcaagcgtggagccgcgacaacccgggctttgaggcagaggaggatgacgacgacgacgaggtggaaggagaagaaggagggatggtggtagagatggatgtggagtggcgcccgggcagtcggaggtcggcctcctcctcggccgtgagctcggtgggcgcccgcggccgagggctcgggagctaccgcggcgcggctcacctgagcgggaggcggcgccggctagaggaccagggcgcgcagtgccccagccccgcgggcggcggggacccgctgcatcgccacctcccgctggagggccagccaccccgagtggcctgggcagagaggctggtgcgagggctgcgaggtctctggggaacaagactcatggaagagagcaacgccaaccgagagaagtacctgaaaagtgtgttacgggagctggtcacttacctctttttcctcgtagtcttgtgcatcttgacctacggcatgatgagctccaatgtgtactactacactcggacactgtcacagctattcatagacaccccagtgtcgaaaacagagaaaaccaactttaaaactctttcttccatggaggacttctggaagttcaccgaaggctccttcctggatgggctgtactggaaggcacagaccagcaaccacacgcaagctgacaaccgaagctttatcttctatgagaacctgctgctaggagtgccgcgtctacgccaactccgagtcagaaacggatcctgctccatccctcaggacctgcgagatgaaattaaagagtgctatgacgtctactccgtcagcagtgaggacagagctccatttggaccgcggaatggaactgcgtggatgtacacaagtgagaaggagctgaatgggagcagtcactgggggatcattgcgtcgtacagtggagcgggttactacctggatctgtccagaaccagggaggagacagcagcccagcttgctggcctcaggaggaacttctggctggaccggggcacgcgggcagcttttatagacttctcggtgtataacgcaaacattaacctgttctgtgtggtcaggttattggcggagttcccagcaacgggtggcgtggtaccctcttggcagtttcagcctgtaaaactgatccgctatgtcacagcctttgatttcttcctggcagcctgtgagatcatcttttgtttctttatcatttactatgtggtggaagagatattggaaattcggattcacagactgagctatttcaggagtttctggaattgtctggatgttgtgattgtcgtgttatctgtagtagctatggtgattaacatttaccgaatgtcaaatgcagaggggctgctacagtttcttgaagatcaaaattctttccccaactttgagcatgtggcatactggcaaatacagttcaacaatataagtgctgtcatggtatttttggtctggattaagctcttcaaattcatcaattttaataggaccatgagccagctctccacaaccatgtctcgatgtgccaaagacctcttcggcttcaccataatgttctccatcatcttcttggcatacgcacagctggcataccttgtcttcggcacccaggtcgatgacttcagcactttccaagaatgtatcttcacccagttccgcatcattttgggtgatatcaacttcgcagagatcgaggaagctaaccgagttttggggccactttattttactacatttgtgttctttatgttcttcattcttttgaatatgttcctggcgatcatcaatgattcgtactctgaagtgaaatcctctgtggcccagcagaaagcagaaatggaactctcagaccttatcagaaagggctgccaaaaagcactggtcaaactaaaactgaaaagaaacactgtagatgccatctcagagagtctccggcaaggtggtggcaaactgaactttgatgagcttcggcaagacctgaaaggtgagggccatacagatgcagagattgaggccatattcactaaatatgaccaggatggcgaccaggaactgaccgagcgtgagcatcaacagatgagagatgacttggagaaagagagggaggacctagacttggaacacagctctttaccacgtccgatgagcagcagaagtttccccagaagcctggatgactccgaggaggaggatgacgaagacagtggccatagctccaggaggaggggaagcatctccagtggggtttcctatgaagagttccaagtactggtgaggcgcgtggaccgcatggagcactccattggcagcatcgtttccaagattgatgccgtgattgtcaagctggagatcatggagcgggccaagctgaagagacgagaggtgttaggacggctgctggatggcgtggctgaggatgcgcgactgggtcgggacagtgagatccacagggagcagatggagcgcctggtgcgggaagagctggagcgctgggaatcggatgatgcagcttcgcaaacaggtcatggtgtaagcacacaagtgggactcggtggccagccccaccccagaaacccgcgccctccttcctcccagtctgcagagggcctggaaggtggaggtggaaatggaagtgccaacgtccatgcctaa

SEQ ID NO: 1002 - DNA, 2667 bp, Mus musculus
atgggcagggtcccgctggcctggtggttggcgctgtgctgctgggggtgtgcagcccataaggacacacagaccgaggctggcagcccgtttgtggggaacccagggaatatcacaggtgccagaggactcacggggacacttcggtgtgagctccaggttcagggggaaccccctgaggtggtgtggcttcgagatggacagatcctagaactggctgataacacccagacccaggtgcctctgggcgaagactggcaagatgaatggaaagttgtcagtcagctcagaatctcagccctgcaactttcagatgcaggggagtaccagtgtatggtgcatctagaaggacggacctttgtgtctcagccgggctttgtagggctggaaggtctcccgtacttcctggaggagcctgaggacaaagctgtgcctgccaacacccctttcaacctaagctgccaggcccagggacccccggaacccgtgaccctactctggcttcaagatgctgtccccctggccccagtcacaggacacagctcccagcacagtctgcaaactccaggcctgaacaagacatcttctttctcatgtgaagcccacaatgccaagggagtcaccacctcccgcacagccaccatcacagtgctcccccagaggcctcaccatctccacgtggtttccagacaacctacggagctagaggtagcttggacccctggcctgagtggcatctacccgctcacccactgcaacctgcaggccgtgctgtcagacgatggggtgggtatctggctgggaaagtcagatcctcctgaagaccccctcaccttgcaagtatcagtgcccccccaccagcttcggctggaaaagctccttcctcacaccccgtatcacatccggatatcctgcagcagcagccagggcccctcaccttggacccactggcttcctgtggagaccacagagggagtgcccttgggtccccctgagaacgttagcgccatgcggaatgggagccaggtcctcgtgcgttggcaggagccaagggtgcccctgcaaggcaccctgttagggtaccggctggcatatcgaggccaggacacccccgaggtacttatggatatagggctaactcgagaggtgaccttggaactgcggggggacaggcctgtgcgtaacctgactgtgtctgtgacagcctatacctcggctggggatgggccctggagccttcctgtgcccctagagccctggcgcccagggcaaggacagccactccaccatctggtgagtgaacccccacctcgcgccttctcgtggccttggtggtatgtactgctgggagcacttgtggctgccgcctgcgtcctgatcttggccctgttccttgtccatcggaggaagaaggagactcgatatggggaggtgtttgagccaaccgtggaaagacctgaactggtagtcaggtaccgtgtccgaaagtcctacagccggcggaccactgaagccaccttgaacagtctgggcatcagtgaagagctgaaggagaaactacgagacgtcatggtagatcggcataaggtggccttggggaagaccctgggagaaggagaatttggcgctgtgatggaaggtcagctcaatcaggatgactccatcctcaaggtcgctgtgaagaccatgaaaattgtcatctgcacaagatcagagctggaggatttcctgagtgaagctgtctgcatgaaggaatttgaccaccccaacgtcatgaggctcattggcgtctgttttcagggctctgacagagagggtttcccagaacctgtggtcatcttgcctttcatgaaacacggagacctacacagtttcctcctgtactcccggctcggggaccagccagtgttcctgcccactcagatgctagtgaagttcatggccgacattgccagtggtatggagtacctgagtaccaagagattcatacatcgggacctggctgccaggaactgcatgctgaatgagaacatgtccgtgtgtgtggcagacttcgggctctccaagaagatctacaacggggattactaccgccaagggcgcattgccaagatgccagtcaagtggattgctattgagagtctggcagatcgggtctacaccagcaagagcgatgtgtggtccttcggtgtgacaatgtgggagatcgccacccgaggccaaactccctatccaggggtggagaacagtgagatttacgactacctgcgtcaaggaaatcggctgaaacagcctgtggactgtctggacggcctgtatgccctgatgtctcggtgctgggaactgaaccctcgagaccggccaagttttgcggagctccgggaagacttggagaacacactgaaggctctgccccctgctcaggagccagatgaaatcctctatgtcaacatggatgagggcggaagccaccttgaaccccgtggggctgctggaggagctgaccccccaacccaacctgatcctaaggattcctgtagctgtctcactgcagctgacgtccactcagctggacgctatgtcctttgtccttctacagccccaggacccactttgtctgctgacagaggctgcccagcacctccagggcaggaggacggagcctga

SEQ ID NO: 1003 - DNA, 4140 bp, Mus musculus
atgaaggctcccaccgtgctggcacctggcattctggtgctgctgttgtccttggtgcagaggagccatggggagtgcaaggaggccctagtgaagtctgagatgaacgtgaacatgaagtatcagctccccaacttcacggcagaaacccccatccagaatgtcgtcctacacggccatcatatttatctcggagccacaaactacatttatgttttaaatgacaaagaccttcagaaggtatccgaattcaagaccgggcccgtgttggaacacccagattgtttaccttgtcgggactgcagcagcaaagccaattcatcaggaggggtttggaaagacaacatcaacatggctctgcttgttgacacatactatgatgatcaactcattagctgtggcagtgtcaacagagggacttgccagcggcatgtccttcctcctgacaattctgctgacatccagtctgaggtccactgcatgttctccccagaagaggagtcagggcagtgtcctgactgtgtagtgagtgccctcggagccaaagtcctcctgtcggaaaaggaccggttcatcaatttctttgtggggaatacgatcaattcctcctatcctcctggttattcactgcattcgatatcggtgagacggctgaaggaaacccaagatggttttaagtttttgacagaccagtcctatattgatgtcttaccagaattccttgattcctaccccataaagtacatacatgccttcgaaagcaaccattttatttactttctgactgtccaaaaggaaactctagatgctcagacttttcatacaagaataatcaggttctgttccgtagactctgggttgcactcctacatggaaatgcccctggaatgcatcctgacagaaaaaagaaggaagagatccacaagggaagaagtgtttaatatcctccaagccgcgtatgtcagtaaaccaggggccaatcttgctaagcaaataggagctagcccttctgatgacattctcttcggggtgtttgcacaaagcaagccagattctgctgaacctgtgaatcgatcagcagtctgtgcattccccatcaaatatgtcaatgacttcttcaacaagattgtcaacaaaaacaacgtgagatgtctccagcatttttacggacccaaccatgagcactgtttcaataggaccctgctgagaaactcttcgggctgtgaagcgcgcagtgacgagtatcggacagagtttaccacggctttgcagcgcgtcgacttattcatgggccggcttaaccaagtgctcctgacatccatctccaccttcatcaaaggtgacctcaccattgctaatctagggacgtcagaaggtcgcttcatgcaggtggtgctctctcgaacagcacacctcactcctcatgtgaacttcctcctggactcccatcctgtatctccagaagttattgttgagcatccatcaaatcaaaatggctatacattggttgtcacaggaaagaagatcaccaagattccattgaatggcctgggctgtggacatttccaatcctgcagtcagtgcctctctgccccttactttatacagtgtggctggtgccacaatcaatgtgtgcgttttgatgaatgccccagcggtacatggactcaagagatctgtctgccagcggtttataaggtgttccccaccagcgcgccccttgaaggaggaacagtgttgaccatatgtggctgggactttggattcaggaagaataataaatttgatttaaggaaaaccaaagttctgcttggcaacgagagctgtaccttgaccttaagcgagagcacgacaaatacgttgaaatgcacagttggtcccgcgatgagtgagcacttcaatgtgtctgtaattatctcaaacagtcgagagacaacacaatacagtgcattctcctatgtagatcctgtaataacaagcatttctccgaggtacggccctcaggctggaggcaccttactcactcttactgggaaatacctcaacagtggcaattctagacacatttcaattggagggaaaacatgtactttaaaaagtgtatcagatagtattcttgaatgctacaccccagcccaaactacctctgatgagtttcctgtgaaattgaagattgacttggctaaccgagagaccagcagcttcagttaccgggaagaccccgttgtctatgaaatccacccaaccaaatcttttattagtggtggaagcacaataacgggtattgggaagaccctgaattcggttagcctcccaaagctggtaatagatgtgcatgaagtgggtgtgaactacacagtggcatgtcagcatcgctcaaattcagagatcatctgctgcactactccttcactgaaacagctgggcctgcaactccccctgaagaccaaagccttcttcctgttagacgggattctttccaaacactttgatctcacttatgtgcataatcctgtgtttgagccttttgaaaagccagtaatgatctcaatgggcaatgaaaatgtagtggaaattaagggaaacaatattgaccctgaagcagttaaaggtgaagtgttaaaagttggaaatcagagctgcgagagtctccactggcactctggagctgtgttgtgtacagtccccagtgacctgctcaaactgaacagcgagctaaatatagagtggaagcaagcagtctcttcaactgttcttggaaaagtgatcgttcaaccggatcagaattttgcaggattgatcattggtgcggtctcaatatcagtagtagttttgttattatccgggctcttcctgtggatgagaaagagaaagcataaagatctgggcagtgaattagttcgctatgacgcaagagtacacactcctcatttggataggcttgtaagtgcccgaagtgtaagtccaactacagagatggtttcaaatgagtctgtagactacagagctacttttccagaagaccagtttcccaactcctctcagaatggagcatgcagacaagtgcaatatcctctgacagacctgtcccctatcctgacgagtggagactctgatatatccagcccattactacaaaatactgttcacattgacctcagtgctctaaatccagagctggtccaagcagttcagcacgtagtgattggacccagcagcctgattgtgcatttcaatgaagtcataggaagagggcattttggctgtgtctatcatgggactttgctggacaatgacggaaagaaaattcactgtgctgtgaaatccttgaatagaatcacagatatagaagaggtctcccagtttctgactgagggaatcatcatgaaagacttcagccatcccaatgttctctcactcttgggaatctgcctgaggagtgaagggtctcctctggtggtcctgccctatatgaagcatggagatctgcgaaatttcattcgaaacgagactcataatccaactgtgaaagatcttataggatttggccttcaagtagccaaaggcatgaaatatcttgccagcaaaaagtttgtccacagagacttagctgcaagaaactgcatgttggatgaaaaattcactgtcaaggttgctgatttcggtcttgccagagacatgtacgataaagagtactatagtgtccacaacaagacgggtgccaagctaccagtaaagtggatggctttagagagtctgcaaacgcagaagttcaccaccaagtcagatgtgtggtcctttggtgtgctcctctgggagctcatgacgagaggagcccctccttatcccgacgtgaacacatttgatatcactatctacctgttgcaaggcagaagactcttgcaaccagaatactgtccagacgccttgtacgaagtgatgctaaaatgctggcaccccaaagcggaaatgcgcccgtccttttccgaactggtctccaggatatcctcaatcttctccacgttcattggggaacactacgtccacgtgaacgctacttatgtgaatgtaaaatgtgttgctccatatccttctctgttgccatcccaagacaacattgatggcgaggggaacacatga

SEQ ID NO: 1004 - DNA, 1114 bp, Mus musculus
gagggctgaaaatgtcacacctttccctgggagcctagccccattgccaggaaaggtgagctcagaagaagacttctgaggcagagtgagtgtcggagaaggcggggactttccccttacttccccagttccctgggcccacccccagaactggtttctaaaggggtaccttaaatgccagttcgtcgggctgggcataagccaggcccggcagctcatttccatgggaggagggcagtttctcttcaccagtctgccagtccttcctccccgccctctttccacttctgccttacccaatccaacctctcctttagagtcagactgctctccagctgatctcatacaaacaccccagacctccagcagctccaggagtcaaaaacaccagcagtggaccgaggtcctacagctgcctgcagccatgttggccttcagtctgctcgtgctgggtctgctcgcggaagtggcacctgccagctgtcaacaaggtctaggaaaccttcagccctggatgcaaggcctcattgctgtcgctgtgttcttggtccttgttgcaatcgtcttcgccgtcaaccacttctggtgccaggaggagccggagcctgggagcacagtgatgatcattggaaacaaggcagatggggtcctggtgggaatggatggcagatactcctcaatggcatctggttttaggtccagcgagcacaagaatgcctacgagaatgttctggaggaagagggcagggtccgcagcacacccatgtgacaagcttctctgtggccctagtccccaggctacagggaacatagagttgatccccaccatctcacccagccactgctctacaggaatctactgaaacaagctgactccctcacctctctagaaacacagtcatctcaggccaggactcagaccaagcccagcacaccatgtgctgtgaccctgggctttcctgggtcttctacccagttctgaggagccttgtgaagggtggctcagctcctcccctccccttgctcctgcaactatggaagtggctcttatttctgtgaaataaagactttttatacttctgggatggagactctgacccagcttccaggctct

SEQ ID NO: 1005 - DNA, 364 bp, Mus musculus
ttttttttttttttttttttttttttttttttttttgggcccaaacaactgtacattgtttattgaaaacacccgtaaatgggaaggagggatgccctgtaccgcattggggccaccactgactgggagccaggcccaaaaagcactggcaaaactgggggggggcttcccatgacacactgaccatttcggagggggggaggaatgaaaggactaggcctaaaaccctggtgccatgctacaaatggggactgattggcctttgcctttcaaaaacagagggtttgggtatgcggactaccagcaaaaaataaaaacttgatttttttaaaagggcctcctgtacataacaaaacagcatttg

SEQ ID NO: 1006 - DNA, 1783 bp, Mus musculus
ggcacgagggagctgcagtgttcgcgcttggtagctggtgcatcggactcagctggctttgtgtccctgaggctcaccgaaaaacactttctcagccctctgactccagagagagagagagagaggtactttttgtggtcaccgactttgacccctgcagaggctgagcgatggcgtctatgggactacaggtcctgggaatctccttggcagtcctgggctggctggggatcatcctgagttgtgcgctccccatgtggcgggtgaccgccttcatcggcagcaacatcgtcacggcacagaccagctgggagggcctctggatgaactgcgtggtgcagagcacaggtcagatgcagtgcaagatgtacgactcgatgctcgccctgccgcaggacctgcaggccgcccgagcccttatggtcatcagcatcatcgtgggtgctctggggatgcttctctcagtggtagggggcaagtgcaccaactgcatggaggacgagaccgtcaaggccaagatcatgatcaccgccggagccgtgttcatcgtggcaagcatgctgattatggtgcccgtgtcctggaccgctcacaacgtcatccgcgacttctacaaccctatggtggcttccgggcagaagagggaaatgggggcctcgctttacgtcggctgggcggcctccgggctgctgctcctgggaggaggcctcctctgctgcagttgcccacctcgtagcaacgacaagccctactcggccaagtactccgccgcccgctctgtccccgccagcaactatgtgtaaggtgggccactctgtccacattgcctttgttattttttttcggattgagctcataacagcctgtggcccctcacattctccaggacctgccctgctatgggccactaactgcttgctggggacaggcaaacccggactgtgcaaagttactagcccgtagctcttgggctgctccacatggctccttacggccggcaagaatggatgtaaaaatatcttgctgcttacatccaaattgcggtggatatgggctgaaggcagaagcagctgggaagggcagtagaggcgcaagctgggtcctgctggccggggtagctcagctgtgactttggactcggagtggatgtcctcatgttagcaaacgtccactgtcctttctctatccccctcactcagcctacacgttactccagcgctactcttgccattacgccccgtgtttccgagcacagctggtcctaccccaagtcatggtgtgctgagtgactgatgaggggccattgagagccggtgggctctgccatggaacccttccgttgattagcaatgactgtgcttgacccacccacctaccctactaatgaatttctgtagagtggatggacgggtttgagggaagaagggtggaggtggattaaactggtttggggagggctggggacctagaagcagcccagtgtgtccccaccccttttccgcactgtcttgctaatgttctgatcactgtgcgccccctccctcttcagaaggaccctgggcctcttgagttggcccctctgagttccctccctttgcccatttcaaggacaccggccagtctgcggaaggaaggtacggggggggggggggggggtgatggcattgtaccagggagtctcctggactcccctgccttctctgtggtttcttgttttgtaattaaggtctgttcacagctgtaattattattattttctacaataaatggcacctgcatacag

SEQ ID NO: 1007 - DNA, 2902 bp, Mus musculus
cggcgcctcgaagagagagggtctctacgctgccccggctccaactgctagtgctgttgttgctgccgctgatgcttgtgccccagcccatagcaggccatggcggcaagtactcgcgagagaagaacgagccggagatggccgccaagcgcgagtccggggaggagttccgcatggagaagctgaaccagctatgggagaaggccaagcggcttcatctgtctcctgtgaggctggccgagctgcattctgacctgaagatacaagagagggatgaactcaactggaaaaagctgaaggtggaaggcttggataaggatggggagaaagaagcaaaactgatccacaacctcaacgtcatcctggccagatacggactggatgggaggaaggacgcccagatggtgcacagcaacgccctcaatgaagacacccaggatgagctgggggaccccaggctggaaaagctgtggcacaaggcaaagacatcagggaaattctccagtgaagagctggacaagctgtggagagagtttctgcattacaaagagaagatccaggagtacaatgtgctgctagacacactgagcagagctgaagaaggttatgagaaccttctcagtccctcggacatggcccacatcaagagcgacaccctgatcagcaagcacagtgagctgaaggacagactgcgcagtatcaaccagggcttggaccgcctgcggaaggtcagccaccagggctatggctccaccactgagtttgaagagccccgggtgatagatctgtgggacctggctcagtctgccaacttcactgagaaggaactggagtcattcagggaggagctcaagcactttgaggccaaaattgaaaagcacaaccactaccagaagcagctggagatttcccaccagaagctgaagcacgtggagagcatcggcgaccccgagcacatcagccgcaacaaggagaaatacgtgctgctggaggagaagaccaaggagctgggctacaaggtgaagaagcatctacaggacctgtctagcagggtctcaagggctcggcacaatgagctctgaggaccagaagccaccagcagcagcctagagagaacacttgaagacaccgggagctgtcagcatgtcatcggcttgcatagacctgaggtgactggtgtggctgaccaccgtggcaaggaggatcccttgaaataccaagctgatcctacagtggctggcaaggacttattttctctcaagcaagtgtagttgtcaccaccctggacgagggccttgggtaccgctaccagtgagataggactggactccgagctgcagcacaacactttatattgaaatcacataaacctgcctgccactggaaacattctgtacacatccttaaatacatggcagagttttgagccctcgagtccttgcctggtatctcgaaggatgggtccattgagccatggcaaagttaagttacagatgaagggggaaggcgaagactagtctacccactggaagcatttccctccctgcttcacgcaccctctccctctctggggatctggccccagacagttttaaatcaagagatttcaggacaaagatggcagaggtgaaagcctgcaggtcttgcagggcgaacgttttctggccccctccacccccaaagaccctgatcagcttccagatccagtctctgttccctcacacagaatagccaaaattttgtctgaccccagcagctgatcctggaagatcaggccattgagtttgttagccgctgaatctcagcccagaaattggaatctgcctatcaggggtgcgcagttaaccatgtttaagaatatcacagccggaaagaggctcagtgagtaaaatgttcatacagcaagcttgaggtctacagtttggatctgcagagccttgctgtgtttacttacctgcagtcccagcacttgagaggcagagaaagtttatcccagccaaataaacaaaggtggagtatatgggagaaggcactctcccactctctgatgtgtgcatacacttacatgtgtacctgtacacaggtgaccactcatagatactcatatatgggtgaaactcccagggcatcatcgtgcaagaagcccatgggttaaggacagcagccgcaagaacagtaggcagtgtggttccctcacccatgctgtgtctgccaccatccaggccaggccagctgggatgtgtccctctgagcactagtagaatatcttcccagaaccctcagcagtgtctgaggctcagagaaattcttgttgctagggtctcagctctgcctttctggttcagcccaacaccaaagcctcctgtgcctcacagcccaggggactcaggctcagagtcaactgctgggggagtgcctggctgtcagatgcaccttcactaatgtttgtctccatccctagagccagagcgcatggctgcatgctaaggcttagaaatgggcacgttgaagtaacatagcagtatacagcccagtgaaccatctcagagtgagtgatagagagcccacagctatgttagggagaggtgtgacctgtgtgggagctgcctgcttctggagcagatctctagtcaggaggccactcctgactaagctctcagatatcagatcctgcaaacttcctgggtgagtgtgactcccaccgcaagggaacctcaagctacaaacttagatgcggttctggctagcagctctgccacctagcaacagtgactgaaagtcctcaggctgacaggtcaccagtcacattatggtaaaccagaacaggttcatgcaagttgtcctctcactatgcgtgctacggcacatgggttcacacaatgaataaaatatcttttaaagc

SEQ ID NO: 1008 - DNA, 248 bp, Mus musculus
  misc_feature (92)..(92): "n" = a, t, g, or c.
ctttccgatttcagatcccctaaacttccatgggtgagtgtgtttcccaccccacgggaacctcaagctacaaaatttgatgcggttttggncagcaggttctgccacctagcaacagtgactgaaagtcctcaggctgacaggtcaccagtcacattttggtaaaggagaacaggttcatgcaagttttcatctcattatgcgtgcttcggcacatgggttcacacaatgaataaaatttcttttaa

SEQ ID NO: 1009 - DNA, 1319 bp, Mus musculus
  misc_feature (1081)..(1081): "n" = a, t, g, or c.
gtgagcattcagtctttagccatggggtctgcagcgttggaaattctgggtctggtgctgtgtctggtaggatgggtgggcttgatcctggcgtgtgggctgcccatgtggcaggtgactgccttcctggaccacaacatcgtgacggcgcagacgacttggaaggggctgtggatgtcgtgcgtggtgcagagtaccgggcacatgcagtgcaaggtgtatgaatctgtgctggcgctgagtgcggaggtgcaggcagctcgggcactcaccgtgggcgctgtgctgctggcgctggtggcactctttgttaccttgaccggcgctcagtgcaccacctgcgtggccccgggcccagttaaggcacgggtagcactcacgggaggagcgctttacgcggtgtgcgggctgctggcactcgtgccgctctgctggttcgccaacatcgttgtccgcgagttctatgatccgacggtgccggtgtcacagaagtacgagctgggcgcggcgctgtacatcggctgggcggcctccgcactgctcatgtgcggtggcggcctcgtgtgttgcggcgcctgggtctgcaccgggcgccctgagttcagcttcccggtcaagtactmtgcgccgcggcggcccacggccaatggcgattacgacaagaagaactatgtctaagggcgggaggcatggcggggctcttcccgcagctaagcccgcgatgggaaagaccgatgcgggaagccgtgtgtggatgacgaccaccgctgggttgcgcagcgcaagtcatgytgggttcgggccagacttgcccgctctcagagtccgttwgaccatcactarccgggccytgctcagaacagactacaggcacttttaagaamttgaccgaccttttyttctatgcgcagttggccacgacgtgggtggaacgctcagatttcatcggtgaagttaggcaccaaactgccgcgaacagttcctactgagatcctgggggcactagatgctgccttaatgtccagtggcacctgctaacctgaaagggcagctggagaaaccccggggctgccagagggangtgttaaaaagggcattttttttkttrktrgwgaagaacctactgaaccaaaggacttagccttggacctggtytcactccagcawyctccccaargttggggccctgtaggtaccagagccttagaggggttgccttcctcctgsaagcttggggcttggggggtgggccgggcaagaatttgctcagtaaatggtttgaacactttaaaaaaaaaaaaaaaaaaaaaaaaaaaaaa

SEQ ID NO: 1010 - DNA, 2361 bp, Mus musculus
atggaggccagattggaacaagctgtgcagaaaaggcaagtactgtttctttatgtgtttcttggagcgtcttgggctagcgccgaacagcttcagtattctgtggcagaggaaaccgagagagggactttcctagccaatctagcaaaggatttggggctggggctgggggaactgtcagcccgggaagctagaattgtttcagaccagaacacacgatttttactgctcagtccgcttactggagaattaattctaaatgagaagctggaccgagaggaactgtgcggccccacagagccctgtgtgctgactttccagttgctgttggaaagaccatttcagatttatcgcgctgcactacatatcaaagatataaatgataattctccagtattcctagacaaagaaatactcttgaaaatatcagaaagtaccactccaggggcgacgcttctcttggaaagggcacaggatgccgatgtgggaacgaacagcctgagtaactacaccatcagccccaatgattatttccatattcacgtgcatgatggaggggaggggcctatcattcctgaactggtactggataaaatgctggaccgggaagaaataccagaattcactttaactctcacagccttagatggtggctctccacccagatctgggacagccttggtgcaaatcttggtgttggacataaatgacaactcccctcaattcgtgcagtcactttacaaagttcagtcacctgaaaacacccctgttggctccttggttgtcgctgtgtctgccagggacttagacacaggaagttacggacaaatagactacacatttttttatgccacagaaagaattctccaaacgtttcaaatcaattctacatctggcgaactttatcttaaacgcgaactcaactatgaagcgattcaaacttattcgataactattcaggccagagatggtggtggactttctgggaaatgtgctgtggttgtagaggtaatggacgtgaatgataacccacctgaatttctcttgtcgtcacttaatagcccaattccagaaaattcacaagagacagttgttgctgtatttaaaattagagacagagattcggggaacaatggaaaaaccctgtgctccattgcgaatgatctccctttcgtcctgaagccatctgtggaaaatttctatactctggtaacagagaagcctttagatagagaatcaaacactgaatacaacatcaccatcacagtcaccgacatgggcatacccaggctcacaacccagcacaccataacagtgcaggtctctgacatcaacgacaacgcccccaccttcacccaaacctcctacaccatgttcgtccgcgagaacaacagccccgccctgcacattggcaccatcagcgccacagactcagactcaggctccaatgcccacatcacctactcgttgcggctgcctcacgacccgcagctggccctggactcgctcatctccatcaatgcagacaatgggcaactgttcgcgctcagggctctggactatgaggccctgcaggccttcgagttccacgtgggtgcaatagaccaaggctcccctgcgctcagcagtcaggctctggtgcgcgtggtgatactggacgacaatgacaatgcgcccttcgtgctctacccgatgcagaacgcctctgcaccctacactgagctgctgcccagggcggcagaacccggatacctggtcaccaaggtggtggcagttgaccgtgattctggccagaacgcctggctgtcatttcagttgcttaaggccacagagcccggactgtttagtgtgtgggcgcacaatggtgaggtgcgcaccaccaggctactaagcgagcgagatgtgcccaagcataagctgctagtggtggtcaaggataatggagagcctccacgctctgccagtgtcacactgcatgtgttgctggtcgatggcttctctcagcccttcctgattctgccagaggtggcgcgcgaccctgcacaagaagatgatgagctaacactctacctggtcattgccttggcttctgtgtcttctctcttcctggtatctgtgctgctgttcgttggagtaagactctgcaggagggcccgggcagcctctccgggtgtctgctttgtgcctgaagaacactttcctggccacctggtggatgtcagcggtgcagggaccctgtcccagaactaccagtatgaggtgtgtctgactggaggatcagggataaccagtgaatttaagtttctaagtccaattgcctctaacttcctaaccgaaagcacagggagagaaatagaataa

SEQ ID NO: 1011 - DNA, 1288 bp, Mus musculus
cttctacctggggctatgatccgtgggcgggcgcctaggactcggccatcaccgccgcctccgctgctgccgttgctgtcgctgtctctgttgctgctgtccccaactgtacgcggagactgcggcccacctccagacattcctaatgccaggccaatcttgggcagacactccaagtttgctgagcaaagcaaagtggcatactcgtgtaataacggctttaaacaagttccagacaagtcaaacatagttgtctgtcttgaaaatggccaatggtcgagccacgaaacattctgtgagaaatcatgtgttgctccagaaagactgagttttgcatccctcaaaaaagagtacctcaacatgaattttttcccagttggtactattgtggaatatgagtgtcggccaggatttcgagaacaacctccactcccaggaaaagcaacttgccttgaggatttagtatggtctccagttgctcagttttgtaaaaaaaaatcatgccctaatcctaaagatctggataatggtcacatcaacataccaaccggcatattattcggttcagaaataaacttctcatgcaacccagggtacaggctagtcggtgtctcctctactttctgttctgtcacaggaaatactgttgattgggacgatgagtttccagtgtgcacagaaatacattgtccagagccaccaaaaatcaacaatggaataatgcgaggggaaagtgactcttatacgtatagccaggtggtcacctattcatgtgacaaaggcttcatcctggttggaaatgctagcatttattgtactgtgagcaagtctgatgtaggacaatggagcagtccaccaccccggtgcatagagaaatccaaggtcccaacgaagaaaccaacaattaatgttccaagtacaggaaccccctcaacgcctcagaagcccacaacagaaagtgttccaaatccaggagaccaaccaactcctcagaaaccttccacagttaaagtttcagcaacccagcatgtacctgttaccaagacaacagtacgtcatccaataagaacatctacagacaaaggagagcctaacacaggtggtgaccgttatatatatggacatacatgtttaataaccttgacagttttgcatgtgatgctatcactcattggctacttgacatagccaacgaagagttacgaagaaagtatataaaactactgataatacttctagtttgttagactgtccaagaagaatggatacaataaatttaatagtgtcg

SEQ ID NO: 1012 - DNA, 1112 bp, Mus musculus
ggatccttcagagaacagagcattctttcttgtcatctgatcatggtgtccaacaacaacaacaacaacaacaacaacaacaaaagacactgaccagaacaattgtcttctgaggcccatcctaggaatgagccatgctggcctactctgtaacatcctctggcctgtttcccagaatgctctgggccctccttctactggcggcctccctgaatgcccataacgatgtctgggacgaaccttgttgcactgagcatgaagtatctgtaaacagaggcagccgtgtggtgatggcctgtaatatctccaacaatctcagagacgtcaccattgagttggttaccagtgaaaagactagcatcatcttcaatcatacgcctccaggaaactactctaaggattcatggcagcttcatattcaaggagtccaggcccagctggtgatcacagatgctcaggacaaacactcagggaactactcctggaagctgcatggattccaggcagagttcaaaaacttcaacctgactgttaatgccgcagacagacagaagacagaggacttgccagtcactaaggtccctgataagcccccaactgcagtgcggacagaagttatcatcatcatcgccattgctaccaccatcatcatcacaggaatcggtgtattcgtttggtacaagcaattccctgtagctccacagatacaaatgtcagtaccttgtctgattcatgggtctcctggtatcccctacctgacactgcccccctaaagtctcccaattcctgcctcaaaagatactcaagggaccttagtagctccaaacatcaggctacagagaacctcacctggctatggctgacaatccaagccctgattgacaagatcacaggaactctctgtctcccaagccctcattttgaccttgggacaggtagacgtcagaatggggtctgtactcctcaggttcctcccaagactccaggacaatttgcactgaggacggcactgtggtttttaactgaggataccctggaagttgtctgaacccctcctgtacatcaaagtatttcagagtaaaaaaaaaaaaaaaaaaaaaaaaaaaaaaaaa

SEQ ID NO: 1013 - DNA, 1076 bp, Mus musculus
tagaagctggagcacacatgcagtgtccaacaacaacaacaaaagacagtgaccagaacaattgtctcctgaggcccatcctaggaatgagccatgctggcctactctgtaacatcctctggcctgtttcccagaatgctctgggccctccttctactggcagcctccctgaatgcctataaccatgtctgggacaaaccttgttgcactgagcatgaagtatctgtaaacagaggcagccgcgtggtgatggcctgtaatatctccaacaatctcagagacgtcaccattgagttggttaccagtaaaaagactagcatcatcttcaatcaaacgcctccaggaaactactctaaggattcatggcagcttcatattcaaggaggccaggcccagctggtgatcacagatgctcagggcaaacactcaggggagtactggtggaagctgcgtggattccaggcagagttcaaaaacttcaacctgattgttaatgccgcagacagacagaagacagaggacttgccagtcactaaggtccctgataagcccccaactgcagtgcggacagaagttatcatcatcatcgccattgctaccaccatcatcatcacaggaatcggtgtattcgtttggtacaagcaattccctgtagctccacagatacaaatgtcagtaccttgtctgattcatgggtctcctggtatcccctacctgacactgcccccctaaagtctcccaattcctgcctcaaaagatactcaagggaccttagtagctccaaacatcaggctacagagaacctcacctggctatggctgacaatccaagccctgattgacaagatcacaggaactctctgtctcccaagccctcattttgaccttgggacaggtagacgtcagaatggggtctgtactcctcaggttcctcccaagactccaggacaatttgcactgaggacggcactgtggtttttaactgaggataccctggaagttgtctgaacccctcctgtactcaaaacgtagactctgttggggcttgggggacatcaaagtatttcagagtatccc

SEQ ID NO: 1014 - DNA, 1365 bp, Mus musculus
agtctcagcatgggctgctacaacggttcggagctccaagacctgggctgttccagccagctgctcctgcagcccctctgggacaccataaggacaagggaggcgttcacgcgctcacccatcttcccagtcaccttttctatcatcacttacgtgggcttctgcctaccgttcgtggtgctggacgtcctgtatccctgggtccccatcctgcgacgctacaagatccacccggacttctcgccttccgtaaagcagcttctgccttgcctggggctgacactctaccagcacctggtgttcgtgttcccggtgacgctgctgcactgggtgcgcagcccggcgctcctcccccaggaggcccctgagctcgtccagctcctaagtcacgtcctgatctgcctgctgctcttcgacaccgagatcttcgcgtggcacctgctgcaccataaggtgccctggctgtaccgcaccttccacaaggtgcatcaccagaactcgtcctccttcgcgctggcgacccaatacatgagcttctgggagctgctttcgctgaccttcttcgacgtgctgaacgtcgcggtgcttcggtgtcacccactcaccatctttacctttcacgtgattaacatctggctgtcggtggaggaccactcgggctatgacttcccgtggtccactcacagacttgtgccctttggctggtacgggggcgtggctcaccacgacatgcatcactctcagtttaactgcaattttgctccttacttcacacactgggacaaaatgctgggcactctgcggtccgcgcccctgccagagagcctttgcgcctgcggtgagcgctgcgtgaactccagagagcgatgcgctgtacacttgatccagaagaagaaacagacttgagttactttattagaagtttgtaacttttaaagtgatgcacactgctataaaatctaatgttgtttttgcagcctgacaaagtaatttatataatgtttctatgtgaatttaattgtggtcttggtgttaaatttcaacttatcccagtgtcattgactccaggacacaaggtagacattcagcgtggtgtatttgaatcattatgatctctgaaatgatttgtttctagaaccaagacttctctatgtatgaaatcgcactggaactgggctctaacctcacatgttgagagaagacctgatttctgactctttaaataatcaaatttgttcctgctgggcagtgaccaaggttatagtatattttttctacttttgaatgaaatgatatatttatattgaaaaaagttttatttgtattttaaaaataaaaagaacatgaactaaaaaaaaaaaaaaa

SEQ ID NO: 1015 - DNA, 1992 bp, Mus musculus
atgggtgtctaccgcatccgcgtctccaccggggactccgtgtacgcgggctccaacaacgaggtctacctgtggttgatcggacagcatggggaggcatctctcgggaagctgttccgaccctgtcggaactcggaggcagaattcaaggtggatgtgtcagaataccttgggccactgctgtttgtgagagtgcagaaatggcattatctcaaagaggacgcctggttctgcaactggatttctgtgaagggccccggagaccagggatcggagtacacgttcccctgttaccgatgggttcagggcaccagcatcctgaacctccctgagggcactggctgcaccgtggttgaagactctcaaggcctgttcaggaaccacagggaggaggaactggaagaaaggaggagtctgtacaggtggggcaactggaaggatggcacaatcctgaacgtggcggcgaccagtatctctgacctccctgtagaccagcgatttcgagaggacaaaagacttgaatttgaagcttcacaggttctggggacaatggacaccgttattaacttccctaaaaacactgtgacctgctggaaaagcctagatgacttcaactatgttttcaagagtggccacaccaagatggctgagcgggttcgaaactcctggaaagaggatgctttctttgggtaccagtttctcaatggtgctaaccccatggtgctgaagcggtctacttgtctccctgcccgcctggtattccctccggggatggagaagctacaggcccagctggatgaggagctcaagaaaggcactctgtttgaagcggatttcttccttctggatgggatcaaggccaatgtcatcctttgtagtcagcagtacctggctgcccccctcgtcatgctgaagctgcagcccgatgggcaactcttgcctatagccatccagctcgaactgcccaaaactgggtctaccccaccgccgattttcacgcccttggatcccccaatggactggctcctggccaaatgctgggtccgaagctcagacttacagcttcatgagctacaggctcatcttctgaggggacacttggtggctgaggtctttgctgtggccaccatgaggtgcctgccttccgtgcaccctgtttttaagcttctagttcctcacctactctacaccatggaaatcaatgtccgggccaggagcgacctgatctcagagagaggcttttttgacaaggtgatgagcacaggtggaggaggccacctggatcttctcaagcaagctggagccttcctgacctacagctcattgtgtccccctgatgacttggctgagcgaggactcctggatattgacacttgcttctatgctaaagatgccctgcagctctggcaagtcatgaatcggtacgtggtgggaatgttcgatctctactacaagaccgaccaagctgttcaggatgactatgaactgcagagctggtgtcaagagatcactgagattgggttgcaaggtgcccaggacagaggcttccccacctccctccagtcccgggctcaggcttgccacttcatcaccatgtgcatcttcacatgcactgcgcagcactcttccatccatcttggccagctggattggttctactgggttcctaatgcaccctgcaccatgcggctgccaccacctaaaaccaaggacgcgacgatggagaagctgatggcgacgctgcccaatcctaatcagtctactctccagataaatgtcgtttggctcctgggcagacgccaggctgttatggtgcccctgggccagcattcagaggaacacttcccaaaccctgaggccaaagctgtgctgaagaagttcagagaggagctggctgccttggataaggaaattgagattcgtaacaagagcttggacataccttatgagtacctgcggcccagcctggtagaaaacagcgtggccatatga

SEQ ID NO: 1016 - DNA, 886 bp, Mus musculus
tgtgagggcttcccggaagatggtgctgattaaggaattccgtgtggttttgccgtgttctgttcaagagtatcaggttggacagctttactctgttgcagaagcgagtaagaatgaaactggtggtggagaaggaatcgaagtcctgaagaatgaaccttacgaaaacgatggcgagaagggacagtacacacacaaaatctaccacctgaagagcaaagttcctgcatttgtgaggatgattgctccggagggctccctggtgtttcatgagaaagcctggaatgcctacccctactgcagaacaattgtaacgaatgaatacatgaaagatgacttcttcatcaaaattgaaacatggcacaaacctgacttgggaacattagaaaatgttcacggtttagatcccaacacttggaaaactgttgaaatagtccacatagacattgcagatcgaagtcaagttgaaccagcagactacaaagctgatgaagaccctgcattattccattcagtcaagaccaagagaggacccctgggacctaactggaagaaggagctggcaaacacccctgactgtcctaggatgtgtgcctataagctggtgaccatcaagttcaagtggtgggggctgcagagcaaagtagagaactttatccagaagcaagaaaaacggatatttacgaacttacatcgccagctcttttgttggattgacaagtggattgacctgacaatggaagacattaggcgaatggaggatgagactcagaaagaactagaaacaatgcgtaagaagggttccgtccgaggcacgtcggctgctgatgcctagatgagcccctgtaggtcagagacattatcagactgtctacggagtcaaggc

SEQ ID NO: 1017 - DNA, 2398 bp, Mus musculus
ggttgatgatgctcctgttacctctgctcgctgtattcttggtgaagcgaagccatactcggacccactcgctgagatattttcgtctagctgtttccgatcctggtcccgtcgtccctgaatttatctctgttgggtatgtggactcacaccctatcactacatacgacagtgtcactcgacagaaggagccgaaagctccatggatggcagagaacctggcacctgatcactgggagaggtacactcagctgctaaggggctggcagcagacattcaaggcggagctgaggcacctacagaggcactacaaccactcagggcttcacacctaccagagaatgattggctgtgagttgctagaagatggcagcaccacagggtttctccagtatgcatatgatggacaagatttcatcatcttcaataaagacaccctctcctggttggccatggattatgtggctcacatcaccaagcaagcatgggaggccaacctgcatgagttgcaataccaaaagaactggctggaagaagaatgcattgcctggctaaagaggttcttggaatatggaagagataccctagaaagaacagagcatccagtggtaagaacaactcgaaaggaaacttttccagggattacaactttcttctgcagagctcatggcttctacccaccagaaatttccatgacatggatgaaaaatggggaagaaattgcccaagaagtggattacggaggggtacttcccagcggggatggaacctatcaaacgtggctgtcagttaatctggatcctcagagcaatgatgtttattcttgtcatgtggagcactgtggtcgccaaatggttctggaggcccctcgggaatcaggggacatccttcgagtgagcacgatctctggaaccacaattctcatcatcgccctggctggagttggtgttctgatctggagaaggtcacaagaactaaaagaagtcatgtaccaacccacccaagtgaatgagggaagctctccctcttaggagccacaatctctgctctcaggcatccgcatgtcttggccatactcctgatgcaaccggggactgtaaaactgagcacttgtgacaggaagataggagctacaaatttttcttcattctttggctccagaagagctgtcaacttttaggctcttgatagactcctttatcacagtcaactttaaatatagtttgtctcatgacccaatacttcccaatattgtagttctcaatagtgatttacaagtagatcacagagtatcagagccgcaagcaactttctcacctaagcaggagatgtcttctaaaatgtcatagacttgagcattagccttcactcaacattatgtgcaagttcccccattctactacaaaacagcctttcttgttcattttctctcctgagaatgtttaccatgtaagaactttgaccactatggctctcatgtttgagaatctataagtagggttgagccaacccatgaaaatagccagcaagtttctacagcagcctttgagtggacgagtcactatatacatatcatggcccaaggggaggcagaagtatccagttcatggtggctctgtcagaaagcaaggaatattgcatgtttgtctggctacatttatggcaatgacttcctttgcttttactgtttctgtgagaaattagaacaataatttatcaagctgagtgtgatgggaatcttagaagcccagtactcaggaagctgaagcaggtagattttacatttggggctagcttgagctacacaatgaaaccctatctgaaataaaccaaaacaacaacaacagcaacacacttaacagaactaaaacaatcattaccagacatattgtcccctcccatggaacggcagacctagactcacttgcaatatttcaacatgaaataatagtgtttggctggagatgtccaggtgggtgaagatgtctgttgccaagcatgtccacctgaggtcagacaccctgacccacacacacagtgaaagaaaaaaactgactcctgaaagttgccctctgacctctccatgagtgctaaactaaggtttttatttttgtttttgttttaatctgacaaaatgtgttcatatgcttatgtctcaaaacgagttctctttactctggtattggagactgaaccagtacagaaaagacaggagttagaattgaacctttgggggtttagggtgtagctcagtggcagagaattttcttagcatgtatgaggccctgaggtcagtcttcagcactttgaacacacacacatacacacaccaccaccaccaccaccactaataacaaacaaaaactaaaactttggatctttcttctgtaagtggttt

SEQ ID NO: 1018 - DNA, 1077 bp, Mus musculus
atggctctaacaatgctgctcttgctggtggcggccgccctgaccctgatcgagacccgcgcgggccaacactcgctgcaatatttccacaccgctgtgtcccggcccggcctcggggagccctggttcatctctgtcggctacgtggacgacacgcagttcgtgcgcttcgacagcgatgcggaaaatccgaggatggagccgcgggcgcggtggatggagcaggaggggccggagtattgggagcgggagacacagatcgccaagggccatgagcagagtttccgagggagcctgaggaccgcacagagctactacaaccagagcaagggcggctctcacacactccagtggatgtatggctgtgacatggggtccgacgggcgcctcctccgcgggtacctgcagttcgcctatgaaggccgcgattacatcgccctgaacgaagacctgaaaacgtggacggcggtggacatggcggcacagatcacccgacgcaagtgggagcaggctggtattgcagagaaagaccaggcctacctggagggcacgtgcatgcagtcgctccgcagatacctgcagctcgggaaggagacgctgctgcgcacagatcccccaaaggcacatgtgacccatcaccccaggtcttatggtgctgtcaccctgaggtgctgggccctgggcttctaccctgctgacatcaccctgacttggcagttgaatggggaggagctgacccaggacatggagcttgtggagaccaggcctgcaggggatggaaccttccagaagtgggcatctgtggtggtgcctcttgggaaggagcagaattacacatgccatgtgaaccatgaggggctgcctgagccccttaccctgagatgggggagatgggagcctcctccatacactgtctccaacatggcgaccattgctgttgtggttgaccttggagctgtggccatcattggagctgtggtggcttttgtgatgaataggaggtgaaacacaggtggacaaggaggggactgtgctccagctccagtgatgggtcttgtccctcattctctagcatga

SEQ ID NO: 1019 - DNA, 140 bp, Mus musculus
acacccaaggagtgtactaacaaatgctgtgatgcaaggacctgtaaaattaaagcaggtttccagtgtgccctgggggaatgctgtgagaaatgccaacttaaaaaacctggggttgtgtgcagagcagcaaaagatga

SEQ ID NO: 1020 - DNA, 1077 bp, Mus musculus; identical to SEQ ID NO: 1018

SEQ ID NO: 1021 - DNA, 1072 bp, Mus musculus
cggaaaacatcaaagtagctctgagaacaatcgcctgttgatggcagctatgcagctcaccctgttctgctttgtgtgtctgctgccaggccacctggccctgccactgtcccaggaagctggagatgtgagcgcacatcagtgggaacaggctcagaattatcttagaaaattttaccctcatgactctaaaacaaagaaggtcaatagtctagtggacaacctcaaggaaatgcagaagttctttggcctgcccatgactggaaaactctccccctacatcatggaaataatgcagaaacctaggtgtggagtgccagatgttgcagaatactcactaatgccaaacagtccaaaatggcattccagaattgtcacctacagaattgtatcctatacttcagacttacctcggatcgtagtggatcaaatcgtgaaaaaagctctcagaatgtggagtatgcagatcccactgaacttcaagagggttagttgggggactgcggatatcataattggcttcgcaaggagagatcatggagacagcttcccctttgatgggccagggaacactctaggtcatgccttcgcacctgggccaggcctaggcggagatgctcactttgacaaagatgagtactggactgatgatgaggacgcaggagtgaacttcctgtttgctgccacccatgaatttggccactctctgggtctgagtcactcttctgttcccggtactgtgatgtaccctacctatcaaagagactactcagaagacttcagtcttacaaaggacgacattgcaggcattcagaagttatatggaaagaggaacacgctgtgatagatgcagacagatcacagaaacggtctgcactcactgggtcctccattgcatccctcagctggcatgaacaaatgcccttcctgagctgcacctgtctccctcttccttgtgctgtggatggattttgcacatccctctgagggtcatcttgacggaatgattctgactaatctcaggtaacatgaagttgcgagacatcaacaataaatgtcatgtgcacaaata

SEQ ID NO: 1022 - DNA, 2286 bp, Mus musculus
atgaactggaggtttgttgagctcctctacttcctgtttgtatggggccgtatctcagtgcagccctcccgccaggagccagctgggacagaccaacatgtctccaaggaatttgattggcttatttcagacagggggcctttccaccactccaggagctacctatcctttgtggaaagacaccggcaaggatttacaaccagatataaaatatacagggagtttgcccgttggaaggtgaggaacacagccatagaaaggagagacctggtccgtcacccagtgcccctcatgccggagtttcaaagaagcatccgtctgctgggcagaagacccaccactcagcagttcattgataccatcatcaaaaagtacggcacccacctgctcatctctgctacattgggaggagaggaggctttgaccatgtacatggacaaaagtcgcctggaccggaagtcagggaatgtaccccaaagtgttgaagctttgcaccagcttgcatcatcctactttgtcgaccgtgatggcaccatgagaaggctccatgagatccagatttcaactggagcaatcaaggtcacagaaacacgcactgggcctctgggctgtaacagctatgacaatctggactctgtgagttctgtccttctgcaaagcacggagagcaaactgcaccttcaaggtcttcagataatcttcccgcagtatctgcaagagaagtttgttcagtcggccttgagttacatcatgtgcaatggagagggagagtatgtgtgtcagaacagccagtgtcgctgccagtgtgctgaggagttcccacagtgcaactgccccatcaccgacatccagatcatggagtttacgctggcaaacatggccaaggcctggactgaagcttataaggacctggagaattcagatgagtttaagtcatttatgaagcgtctcccaagcaaccacttcctgacgattggcagcatccaccagcactggggcaatgactgggacctgcagagccgttacaagctcctacagagtgccactgaggctcagaggcagaaaatccagaggaccgcccgcaagctctttggcctcagtgtgcgctgccgccacaatcccaaccaccagctgcctagagagaggacaattcaacagtggcttgcaagggtccagtcacttctctattgcaatgagaatgggttctggggaaccttcctggaaagccagaggagttgtgtgtgccatggtagcaccacactgtgccagcgccctatcccatgtatcataggtgggaacaacagctgtgccatgtgcagcctggccaacatctcactctgtggctcctgcaataagggctacaagctgtatagaggccgctgtgaaccacaaaacgtggactctgagcggagtgagcagttcatcagctttgagaccgacctggacttccaggacttggaactgaagtacctgttgcagaagatggattcacgcctctatgtccatactaccttcatcagcaatgagattcgcctggatacattttttgaccctcggtggcgcaagcgcatgtccctcactctcaaaagcaacaagaaccgcatggactttatccacatggtgatcggaatgtccatgcgtatctgctttcaaaggcgcaacagcagcctggaccctatgttctttgtctatgtcaatcccttcagtgggagccattcagaaggctggaacatgccctttggggaatttggctaccctcgttgggagaagatccgtctgcaaaacagccaatgctacaattggactctcttgctgggcaatcgggtgaaaacttttttcgagactgtccatatctacctacgtagtcggactcggctacccaccctacgcaatgagactggccagggcccggtggacctgtcggatccctccaaaaggcagttctacatcaagatctctgatgtacaggtgtttgggtacagcctgaggttcaatgctgacctcctacgaagtgccgtgcaacaggtgaatcagtcctatacacagggtggtcagttctattcctcctcatccgtgatgcttctcatgttggacattcgggaccgaatcaaccgcctggcccctcctgtggccccaggaaaaccccagctggacttgttttcctgtatgctgaagcaccgcctgaagctgaccaacagtgagattatcagggtgaaccatgccttggacctctacaacactgagatcctcaaacagtctgaccagatgacagccaaactctgctaa

SEQ ID NO: 1023 - DNA, 474 bp, Mus musculus
tttttttttttttttttactttttaaaactttattgattttttccacctgatcaaagcatggggtatttaacagtattatacataatatttttttacatagaaaactttacatagcatttcatattatataattctgctttattctttcaaaaatgtttacatccattgggcaaggaatgcttttcattaaattaccaatattaaatgcacttaatcattgtgtatagatgaaatcaaggaagctggtaactaactctgagacatttttaaagagcaaacatttagcacataaagaaatgtttgatgcaaatacacaagataaaacttcttaaaaacttagaacactgagaaaaccccacatgtgggaagagttgtcattttctgacagtaagtgtttccagagggattcattctctatgatgctcggctttggtgtgtctgcttccaaaaccccaaaagctactggtagcaca

SEQ ID NO: 1024 - DNA, 614 bp, Mus musculus
cctttctcacctggaagacagctcctcctcgaaggtttacaaaatgtgtgatgcctttgtgggaacctggaagcttgtctccagtgaaaacttcgatgattacatgaaagaagtgggagtgggctttgccacaaggaaagtggcaggcatggccaagcccaacatgatcatcagcgtaaatggggatttggtcaccatccggtcagagagtacttttaaaaacaccgagatttccttcaaactgggcgtggaattcgatgaaatcaccgcagacgacaggaaggtgaagagcatcataaccctagatggcggggccctggtgcaggtgcagaagtgggatggaaagtcgaccacaataaagagaaaacgagatggtgacaagctggtggtggaatgtgttatgaaaggcgtgacttccacaagagtttatgaaagggcatgagccaaaggaagaggcctggatggaaatttgcatcaaacactacaatagtcagtcggatttattgttttttttaaagatatgattttccactaataagcaagcaattaattttttctgaagatgcattttattggatatggttatgttgattaaataaaacctttttagactt

SEQ ID NO: 1025 - DNA, 1524 bp, Mus musculus
ccatgggccaatgcggcatcacctcctctaagaccgtgctggtcttcctcaacctcatcttctggggggcagctggcatcctctgctacgtgggagcctatgtcttcatcacctatgacgactatgaccacttcttcgaggatgtgtacacgctcttccctgctgtggtgatcatagctgtaggagccttgcttttcatcattggcctgatcggctgctgtgctacaatccgggagagccgctgtggacttgccacgtttgtcttcatcctgctcttggttttcgtcacagaagtggttgttgtggttttgggatacgtgtacagagcaaaggtggagaacgaggttgatcgcagcattcagaaagtgtataagacctacaacgggaccaactccgacgctgccagccgtgctattgactatgtgcagagacagttgcactgttgtggaattcataactattcagactgggaaaatacagattggttcaaagaaacaaaaaaccagagtgtccctcttagctgctgcagagagactgccaaaagctgtaacggcagcctggccaacccctctgacctctacgccgagggctgtgaggctcttgttgtgaagaagctacaagaaatcttgatgcatgttatctgggcagcgttggcctttgcagctattcagctgctgggcatgctgtgcgcatgcatcgtgttgtgcagacggagtagagatcctgcctatgagctcctcatcactggcggaacctacgcgtagggacagcacgtgcctgagctaatttgtagtatccttgttctgattcagaaggtgaattgagcaggcctgcagcagttggctcctgagttcatctagtcaaagcacacgtacactggtgttgactagcaggttggcatttcatgtacccaccttcctacctgcccctctggctttcttacccttgttctagatgattctccatgcccttaatttcagaaccatttacaagttctgtaatgtggtagagctataggagggtgtggcctgcttctgtcacctctgaggagtaatggactgtgttgtggtatcactgggcccttttcgtcttcataacgagaactcttggccaaaggtttgagggtaagagggaggacgccagctgtctggtgccgcacaccagtgtccttttaaagaatatatactgtagtacaataatatagcaattgtacaaaatggctaacatagattttagaatcaaacagtatgtgtctttgttcatcttcaaaatcagagactgatctttgaaattagtggtttttaatcaaagctggctttataggaagactataatgtatgcactactgttttaaagcagttggtgtgagtgtgtgcgtttctctgtgtgattgaacccattcatcataagtcttacactcgttagagataatgtacccatggagactagcaaaatagtatgtagatgtgatctcaattgtaaatagaaaaatttaattcaataaactctgtatcagctcgtgcc

SEQ ID NO: 1026 - DNA, 782 bp, Mus musculus
ctgacgtgttccagaaggaagtgcatcttcatacaccaccacacctgaaagcagaacctggtccacgtgcagtcatggcagctgagtccctgcctttcaccttggagacggtgtccagctgggagctggaagcctggtatgaggatctgcaggaggtcctgtcctcagatgaaattgggggcacctatatctcatccccaggaaacgaagaggaagaatcaaaaaccttcactactcttgaccctgcgtccctagcttggctgacagaggagccagggccaacagaggtcacacgcacatcccaaagccctcgctctccagattccagtcagagttctatggcccaggaggaagaggaggaagagcaaggaagaactaggaaacggaaacagagtggtcagtgcccagcccggcctgggaagcaacgcatgaaggagaaggagcaggagaacgagcggaaagtggcacagctagctgaagagaacgagcggctcaagcaggaaatcgagcgcctgaccagggaggtggagaccacacggcgggctctgatcgaccgcatggtcagcctgcaccaagcatgaacagtgggcatcacctcctgtctgtctctccggaagtgtacccagcaccatcgcgccagcgccaagcatgtgaccctgcactgcactgcacatgctgaggaggggactgagggtagaccaggagagggctcggcttgcacatagacggtacattgtttattactgtccatgtccagtaaagtgactttgtgtcaaaaaaaa

SEQ ID NO: 1027 - DNA, 547 bp, Mus musculus
ccttttccggtcgcggcgctgcggtgtggagctcgtgcttgtgctcggagctatgccgtccaagggtccgctgcagtccgtgcaggtcttcggacgcaagaaaactctcgctgtggcccactgcaaacggggaaatgggctcatcaaggtgaacggacgtcccctggagatgatcgagccgcgcgcgctgcagtacaagttactggagcctgttttgcttctgggcaaggagcgatttgctggtgtggatattcgggtccgtgtgaagggtggtggacatgtggcccaaatttatgccatccgacagtccatctcaaaggccctggtagcttattaccaaaaatatgtggatgaagcctccaagaaggagatcaaagatatcctcatccaatacgatcggaccctgcttgtagctgacccccgtcgctgcgaatccaaaaagtttggaggtcctggtgcccgtgcccgataccagaaatcctaccgataagcccatctcaaggatcggggtttacctttgtaataaacatcctaggattttaacgtt

SEQ ID NO: 1028 - DNA, 1006 bp, Mus musculus
cagctgcagtccaggctcatttaggcagtgagggagggtaagcaagcatcacaaattatcaagctagctagtggaagattagtagtagctgggcagaactaaggcaggattgggagaaggtagggggattttcagcctgggcaaaattcctatcttagaatgactattctatgcacagaactaggaatacagatagattggctaaggggagaaatctgtgtacaaacagtgtccattatgaactctaccccagcaaaagtgaaaggaattattgagaacaaaggttgctgctaaactggacaacacattgaacttggggatttccaacccagctactcacatataagcagacacaaggatcttttcttattcagcctctgactacagacatggcttctgtccgcacctgtgttgtccgttcagaccaatggcggttaatgacctttgagaccactgagaatgacaaagtgaagaagataaatgaacatattaggtcccaaaccaaggtctctgtacaggaccagatccttctgctagactccaaaatcctcaagccccatcgaaaattgtcatcctatgggattgacaaggaaaccactatccaccttaccctgaaggtggtgaagcccagtgatgaagagctgcccttgtttctggtggagtccaaaaacgaggggcaaaggcacctcctccgagttcgaagatccagctcagtggcccaggtgaaagagatgatcgagagtgtgacctctgtgatccctaagaagcaggttgtgaattgcaacggaaagaagctggaagatggaaagatcatggctgactacaacatcaagagtggcagtttgctctttctgacaacacactgcactgggggatgaccacggggatgcggtgatgagaagctcaaagccgatttcctctgagctattaccaatcacatctcttgatgatataaaaaattaacgagaatgaaataaatatttgagggaagtggagtagattaaaa

SEQ ID NO: 1029 - DNA, 1980 bp, Mus musculus
gggactcagctagcccaccaacttgcgactgatttggtttcctctttctcctctgatttttaagaagtgaggcaaaaaaccaattcctgttcatttttgagacaatgcaaggggctctagacaccgttgcaggaagctgatttcatggaggtcaccaaaaaagtgggccgggacaccaggaagggggctagggatcccaccgtggaggtgggctccagggagtaggcaccacagcggctgggatggcagacagagaggctccgcaggaggctccgagaggccacactgcctatcgcccttctggctgttctacctcttcaatgccccgaaggtctgagactgcagagcgggggcacggagtgtctcgctaactgggccaggcagtgacgcgggaccggcgcaccctcccacccccaccctaacggcactgacaccggggcaccggcgcgggtccctgcatcagctagctccggagctgcgcgctccacgatggctccgggccgggcagtggccgggctgctgctgctggcggccaccagcctgggacacccctcggagggaccggagctcgccttcagtgaggatgtgctgagcgtgttcggcgccaaccggagcctgtcggccgcgcagctggggcgcctgctggagcgtctgggggctgcatcccagcagggagcgctggacctgggccagctgcacttcaaccagtgtttgtcagcagaagacatcttttctcttcatggtttctcaaatgtcacccagataaccagctcgaacttctctgccatctgccccgcgatcttacagcagctgaacttccatccctgcgaggatctaagaaagcacaacgcaaagcccagtctttccgaagtctggggctatggattcctgtcagtgacaattatcaatctggcctctctcctgggattgattttaacccccttgataaagaagtcttatttccccaagattttaacttatttcgtgggactcgctattgggactcttttctcaaacgccattttccagcttattccagaggcatttggatttaatcccaaaattgacaattacgttgagaaagcagttgctgtgtttggtggattttacatgcttttctttgtcgagagaacacttaagatgctactgaaaacatatggccagaatgaccatactcacttcaggaatgatgactttggttctaaagaaaaaacccaccaacccaaaacgttaccattgcctgcagtcaacggtgtgacttgctatgccaaccccgctgtcactgagcctaacggacacatccacttcgacactgtcagcgttgtatccctccaggatggaaaaacagagccaagctcatgtacctgtctgaaggggcccaaactgtcagaaataggaacaattgcctggatgatcacgctttgtgatgccctccacaatttcatcgacggcttggcgattggggcatcttgtactttgtctcttcttcaggggctcagtacgtccatagcgatcctgtgtgaggagtttcctcatgagttaggggactttgtgatcttgctcaatgcaggaatgagcacccggcaagccttgctgttcagcttcctctccgcgtgttcctgctacgtgggactagctttcggcattttggtgggcaacaattttgctcccaatattatatttgcactcgctggaggcatgttcctctacatttctctggcagatatgtttccagagatgaacgacatgctgagagaaaaagtaactggaagacaaacggatttcaccttcttcatgatccagaatgcagggatgttaaccggcttcactgccatcctgctcatcaccttgtacgcaggagacatcgaattgcagtagccggaagtggagtataacgtcaacgcgggaagccatttaataacaacacagaaacatctccatagggatttttgtttttttaaaagtatatcctatttagtt

SEQ ID NO: 1030 - DNA, 597 bp, Mus musculus
atgagctccagaggtcacagcacgctcccacggactctcatggcccctcggatgatttccgagggagacataggaggcattgctcaaatcacctcctctctcttcttgggcaaagccagcgtggcctccaactggcacctcctccaggcccgcggcatcacctgcgtcatcaatgccaccatcgagatccccaacttcaactggccccagtttgaatatgttaaagtgcctctggctgacattcctcatgcccccattagactgtactttgacactgtggccgacaagatccacagtgtgagcaagaagcacggggctaccttggtgcactgtgcggcaggcgtgagccgctcggccaccctctgtattgcgtacctgatgaaattccacaatctgtgcctgttggaggcatacaactgggtgaaagcccggaggcctgtcatcaggcacaacctgggcttttggaggcagctgatagaatacgagcgccagctctttgggaagtcttcagttaagatggtacagacaccctatggcatcatcccagacgtttatgagaaggagtcccgacacttgatgccttattgggggatttag

SEQ ID NO: 1031 - DNA, 1386 bp, Mus musculus
tcggagaaaatgcatcatctttcccaatgatgcacttctgccccagagaataaagactcggtgatcaccgcttttggtccaggagcttaactgcctcttgcagcctctctgaccacctgtgcttcctccaggatggattcatgggtggtgctgctgggcctacaaatcatatggctcccactcctgacccacggtacagcccccactcccaccctgagatttgtggctgtgggcgactggggaggggtccccaatgccccattccacacagcccgggaaatggccaatgccaaagagatcgccagaaccgtgcagacgatgggcgctgacttcatcatgtctctgggggacaatttctacttcactggagtgcacgatgccagcgacaagaggttccaggagacctttgaggacgtgttctctgaccgtgcccttcgcaacatcccctggtatgtgctggctggaaaccatgatcaccttggcaacgtctctgcacagattgcatactctaagatctccaagcgctggaacttccccagcccttactaccgtttgcgcttcaaaattccacgtacaaacataactgtggccatctttatgctggacacagtgatgctgtgtggcaactcagatgactttgccagtcagcagcccaaaatgcctcgagacctgggagtggcccgcactcagctgtcctggctcaaaaagcagttggcagcagccaaggaggactacgttttggtggccggccactaccccatctggtccatcgccgagcacggacccacgcgctgccttgtcaagaacttgcgaccattgttagccacatacggggtcactgcctacctgtgtggacatgaccacaacctgcagtatcttcaggacgagaacggtgtgggctatgtgctgagtggggccggcaacttcatggatccctctgtgcgacatcaacgaaaggtccccaacggctacttgcggtttcactatggatctgaggactccctgggcggcttcacacatgtggagataagccccaaagaaatgaccatcatatatgtggaagcctctggaaaatcactctttaagaccagcctcccaaggagacccagaccctgaacaccacgagagtcctgcttgtcgctacggtgtgagggaggaggcgtctgcaggcgtggtgggtgggccctgtgaggacctcactcacggcagcttctctgccctggtactctggcagagagggaaggggaaccaaggggcttacttacaggaaagaagtatgcccacaccaactgatcccacagccaggctcacccctttttaggtagagctttcttgggcggggctttcctttcagtcaagtcttactgtcactgctattcaataaaa

SEQ ID NO: 1032 - DNA, 1193 bp, Mus musculus
ggcacggctcccagccccggagcatgcgcgacagccgccccggagcccccagccgcggctccccgcgtcctgccgccagcgcagccccggacgctatggcccacccctccagctggcccctcgagtaggatggtagcacgcaaccaggtggcagccgacaatgcgatctccccggcagcagagccccgacggcggtcagagccctcctcgtcctcgtcttcgtcctcgccagcggcccccgtgcgtccccggccctgcccggcggtcccagccccagcccctggcgacactcacttccgcaccttccgctcccactccgattaccggcgcatcacgcggaccagcgcgctcctggacgcctgcggcttctattggggacccctgagcgtgcacggggcgcacgagcggctgcgtgccgagcccgtgggcaccttcttggtgcgcgacagtcgccaacggaactgcttcttcgcgctcagcgtgaagatggcttcgggccccacgagcatccgcgtgcacttccaggccggccgcttccacttggacggcagccgcgagaccttcgactgccttttcgagctgctggagcactacgtggcggcgccgcgccgcatgttgggggccccgctgcgccagcgccgcgtgcggccgctgcaggagctgtgtcgccagcgcatcgtggccgccgtgggtcgcgagaacctggcgcgcatccctcttaacccggtactccgtgactacctgagttccttccccttccagatctgaccggctgccgctgtgccgcagcattaagtgggggcgccttattatttcttattattaattattattatttttctggaaccacgtgggagccctccccgcctgggtcggagggagtggttgtggagggtgagatgcctcccacttctggctggagacctcatcccacctctcaggggtgggggtgctcccctcctggtgctccctccgggtcccccctggttgtagcagcttgtgtctggggccaggacctgaattccactcctacctctccatgtttacatattcccagtatctttgcacaaaccaggggtcggggagggtctctggcttcatttttctgctgtgcagaatatcctattttatatttttacagccagtttaggtaataaactttattatgaaagtttttttttaaaagaaacaaa

SEQ ID NO: 1033 - DNA, 1850 bp, Mus musculus
gactgccatcgagtggtgttccagttgaacttgctttctctgccatctgctccgcgggcgccgtcagcatgggtccctggacccactccttgcgcgccgtcctgctgctggtgcttttgggagtctgcaccgtgcgctccgacactcctgccaactgcacctaccctgatctgctgggcacctgggtgttccaggtgggccctagaagttcccgaagcgacattaactgctcggtgatggaagcaacagaagaaaaggtagtggtacaccttaagaagttggatactgcctacgacgagctgggcaattccgggcattttaccctcatttacaaccaaggcttcgagattgtgttgaatgactacaaatggtttgcgtttttcaagtatgaagtcagaggccacacagctatcagttactgccatgagaccatgactgggtgggtccatgatgtgctgggccggaactgggcttgctttgttggcaagaaggtggaaagtcacattgagaaggttaatatgaatgcagcacatcttggaggtctccaggaaagatattctgaaagactctacactcacaaccacaactttgtgaaggccatcaataccgttcagaagtcttggactgcaactgcatataaggaatatgagaaaatgagcctgcgagatctgataaggagaagtggccacagccaaaggatcccaaggcccaaacctgccccgatgactgatgaaatacagcaacaaattttaaatttgccagaatcttgggactggagaaacgtccaaggcgtcaattatgttagccctgttcgaaaccaagaatcttgtggaagctgctactcatttgcctctatgggtatgctagaagcaagaattcgtatattaaccaacaattctcagacaccaatcctgagtcctcaggaggttgtatcttgcagcccctatgcccaaggttgtgatggtggattcccatacctcattgcagggaagtatgcccaagattttggggtggtggaagaaagctgctttccctacacagccaaagattctccatgcaaaccaagggagaattgcctccgttactattcttctgactactactatgtgggtggtttctatggtggctgcaatgaagccctgatgaagcttgagctggtcaaacatggacccatggcagttgcctttgaagtccacgatgacttcctacactaccacagtggaatctatcaccacactgggctgagtgaccctttcaaccccttcgagctgacaaatcatgctgttttgcttgtgggctatggaagagatccagttactgggatagaatactggattataaagaacagctggggctctaactggggggagagtggctacttccgtatccgcagaggaactgatgaatgtgcaattgagagtatagccgtggcggccataccgattcctaaattataggacatagctcccagtgttacatacgggtctttatcactcacagagtgatttagtcacatgctgaagactttttcagagcaatatcagaagcttaccactaagcatctttaaagaattttgtctttgaacttaaaaccatccttgatttttttcttttaatatcttccccatcaactactgaactacttttctttttaaagtacttggttaagtaatacttttatgagcagtggttcagttgtccaatattttttgcaggtcatctacaatgcaaccagatgtttcagttctaaaaatctatgtaaaagtacaagctcgtttttaaattatgttagtcacacgaaaacatggcaaaaaaattagttaaattttttacaaagagtttaaataaat

SEQ ID NO: 1034 - DNA, 498 bp, Mus musculus
attcggcacaggcagacttctccaacgaagaacggtttacgggctttgcagcatactacactgccatagacataaatgaatgcacagattttacagatgtcccctgtagccacttctgcaataacttcattggtggatacttctgctcctgtcccccagaatacttcctccacgatgacatgaggaattgtggagtcaactgtagtggagatgtgttcactgccctgattggggagatctcaagtcccaattatcccaatccatacccggagaactcaaggtgtgaataccagattcagctgcaagagggcttccaagtggtggtgacgatgcaaagagaagattttgatgtggagcctgctgactcagaggggaactgccctgacagtttaactgtgcgttgtagataatgagattggttctgacccccaactcatttagattgctgaggcttctctggcagccgcattctctgtggttctgggcaaacactccact

SEQ ID NO: 1035 - DNA, 1479 bp, Mus musculus
cggggtttctgggtttcagagcagtggcctggactgcaaagagggagctgtgggtttttattgtaaggttcaggaaaagaagcggcatcaccaaacgctgtcagtcatgttttctttcaacatgtttgaccacccgattccccgggtcttccagaaccgcttctccacgcagtaccgctgcttctccgtgtccatgctagcagggcctaatgacaggtcagatgtggagaaaggagggaagataattatgccaccctcagccctcgatcaactcagccggctcaacattacctatcctatgctgtttaaattgaccaataagaattcagatcggatgacacactgcggtgtactggagtttgttgctgatgaaggcatctgttacctcccccactggatgatgcagaatttgctgttggaggaagggggcctggttcaggtggaaagtgtcaacctccaagtggcgacctactctaagttccagcctcagagcccagacttcctggatattaccaaccctaaagcggtattagaaaatgcattgagaaacttcgcctgtatgacgactggagatgtcattgctatcaactacaatgaaaagatctatgagctgcgggtgatggagaccaaacctgacaaggctgtatccattattgaatgtgacatgaatgtggattttgatgctcccttgggatacaaagaaccaaaaagaccagtgcagcatgaggagtcaatagagggagaagctgaccacagtggctatgccggagaagtgggcttccgtgccttctctggttctgggaatagactggatgggaagaaaaaaggggttgaacccagtccctccccaatcaagcctggagacatcaaaagaggaattcctaattacgaatttaagcttggtaagatcactttcatcagaaattcacgtccccttgtcaaaaaggttgaagaggatgaagctggaggcagattcgttgctttctctggagaaggacagtcgctgcggaagaagggaagaaagccctaagtctaaaactgttggctgactggaaaataaaagatccgattgcacctggcttacagttactggctctgacaagttcagagatactctgttatttatggtttgtttaaagttacctgagaactatcaagcttgtcctggatacaaagcagcagaacttggaggttgtgtgcttgatctggggaaaaaagcgctggggtcctctagttgttggcctcctccactccctaactccagcttcagggccctcacagcctcagcagagcagctcccgattcctgactcactcttcttccccatgtctgttcatggtgcagtgtctttagcccatcatggctactcaggccagcacttgagtaccacacaaagatggcctctgtttttatttacagtgactcagaagggatctcatccagatgaaaggctctcattttaatctgctcgctctcagt

SEQ ID NO: 1036 - DNA, 1239 bp, Mus musculus
acacaggcacctatccttcctgcccacttctgccttcagaaacacaagacttcaagttcccactaagccaccatgcatttgtttgctgaagccactactaaattcacacttgagctgtacaggcagctcagagaatcagataacaacattttcttctattccccgatcagcatgatgacagcattagcaatgctccagcttggagccaaaggaaacactgaaaaacaaattgagaaggttcttcaattcaatgaaaccaccaagaagacaacagaaaaatctgcacactgccatgatgaagaaaatgttcatgaacaatttcaaaagcttatgactcagttaaacaaatccaatgatgcttatgatctaaaggctgccaacagtatctatggagcaaagggtttcccatttgtccagacatttttggaagacattaaggaatattatcaagctaacgtggaatcactggatttcgaacatgcagcagaagagagtgaaaagaagattaattcctgggtagaaagccaaacaaatggaaaaatcaaggacttatttcctaatgggagcctgaacaggagcactataatggttctggtgaatgcagtgtatttcaaaggacaatggaaccacaaatttgatgaaaagcataccacagaagaaaagttttggctgaacaagaacacaagtaaacctgtccagatgatgaaacaaaacatcgaatttaacttcatgtttctggaggatgtgcaggccaagattgtggaaataccatacaaaggcaaagagctaagtatgattgtcctgttgccagtggaaatcaatggtctgaagcagcttgaagaacaactcactgctgacaagttactggagtggacaagagcagaaaacatgcatatgaccgagttgtatttatctttgcctcggttcaaagtggatgagaagtatgacctcccaattccattggaacacatgggaatggtcgatgcctttgatccacagaaggctgacttctctggtatgagcagcactcaaggtcttgtggtgtctaaagttttacacaagtcctttgtggaggtgaatgaagagggaacagaagctgctgctgcaacaggtgtggaagtcagtttaacatcagcacagatagcagaagatttctgttgtgatcatccattcctattcttcatcattcacagaaaaaccagcagcatcctcttctttggcagaatctcctccccttag

SEQ ID NO: 1037 - DNA, 1479 bp, Mus musculus; identical to SEQ ID NO: 1035

SEQ ID NO: 1038 - DNA, 1317 bp, Mus musculus
ctcatctcttctctgcttgctaccagtccggaaatcgagaatctaggagaatctagggctcaccatcatggatcctctacaggaagcaaatggcacctttgccttaaatcttttgaaaatactgggtgaagacagctcaaaaaatgtatttttgtcacccatgagcatatcctcagccctggctatggtcttcatgggggcaaaaggaaccactgctagccagatggctcaggcacttgctttggataaatgcagcggcaatggaggtggagatgtccaccagggcttccagtcccttctcaccgaagtgaacaaaactggcacacagtacttgctcagaacagccaacaggctcttcggggataagacttgtgatcttttagcgtcttttaaagattcctgcctcaagttctatgaagcagagttggaagagctggactttcagggtgctacagaggagtcccgacagcacatcaacacctgggtagccaaaaagacagaagataaaatcaaagaggtgctgtctccaggtacagtgaattctgatacatcgctagtccttgtgaatgccatctacttcaaaggaaactgggagaagcagtttaacaaagagcataccagggagatgccattcaaagtcagcaagaatgaggagaaacctgtgcaaatgatgtttaagaagtctacctttaagatgacctatattggagagatattcactaagattctgttgcttccctatgtcagcagtgagctgaacatgatcatcatgcttccagatgagcacgttgaactgagtacagtggaaaaggaagtaacttacgagaaatttatagagtggacaaggctggacaagatggacgaagaagaggtagaagtatttctcccaaagtttaagctggaggagaattacaacatgaacgatgccctctacaagttgggcatgactgatgcctttggcggcagggcagacttttctggaatgtcttccaagcaaggcttgtttctgtctaaggttgtgcataaggcctttgtggaggttaatgaggagggcacagaggctgcagctgctacagctggcatgatgacggtgaggtgcatgagattcactccccgcttctgtgccgaccaccccttccttttcttcattcaccatgttaagaccaatggaattctgttctgtggccggttctcctctccctgagcaaagggtattcctgtcagtctttgaccctctctccatggtttgctgtaacccaagtgaccttatccataagtgcaatggcaattatgaaataaagggctttatggcacccc

SEQ ID NO: 1039 - DNA, 2318 bp, Mus musculus
ggtccttgccctcgcagctccggccctcgacaccaccggcccctccgctggtgacgcccccgcagaggcttcgccgtcgccgaggccttctctccgcgactcgtcgccgcaggattctactttcactgggttccgcccgcacaccgccaccattgacgccatgtcgagttattctagtgaccgagaccgcggccgggatcgagggtttggtgcacctcgatttggagggagtagaacaggacccctctctggaaagaagtttggaaatcctggggagaaactagttaaaaagaagtggaatcttgatgagctgcccaaatttgagaagaatttttatcaagaacaccctgatttggcaaggcgcaccgcacaagaggtagatacatacagaagaagcaaggaaattacagttagaggtcacaactgtccaaaacctgttctgaatttttatgaagcaaactttcctgcgaatgtcatggatgtgattgcaaggcataactttactgaacccactgctattcaagctcagggctggccagttgctctcagtggattggatatggttggagtagctcagactggatctgggaaaacattatcttatttgctgcctgccattgtacacataaaccaccatccattcctagagagaggtgatgggcctatttgcttggtgctggcaccaactcgagaactggcacagcaggtgcagcaagtggctgctgaatattgtcgagcttgtcgcttgaagtctacttgcatctatggtggtgctcccaaaggaccacagattcgtgatttggaaagaggtgtggaaatctgtattgcaacacctggaagactgattgactttttagagtgtgggaaaaccaatctgagaagaacaacttaccttgtccttgatgaagctgataggatgcttgatatgggatttgaaccccagataaggaaaattgtggatcaaataagacctgataggcaaacactaatgtggagtgcaacttggccaaaagaagtaagacagcttgctgaagatttcctgaaagactatattcatatcaatattggtgcactggaactgagtgcaaaccataacattcttcagattgtggatgtatgtcatgatgtcgaaaaggatgaaaagcttattcgtctgatggaagaaatcatgagtgagaaggagaataaaactattgtttttgttgaaaccaaaagaagatgtgatgaacttaccagaaaaatgaggagagatgggtggcctgccatgggcatccatggtgacaagagtcagcaggaacgtgactgggttctaaatgaattcaaacatggaaaagctcctattctgattgctaccgatgtggcctccagagggctagatgtggaagatgtgaaatttgtcatcaattatgactaccctaactcctcagaggattatattcatcgaattggaagaactgctcgcagtaccaaaacaggcacagcatacactttctttacacctaataacataaagcaagtgagcgaccttatctctgtgcttcgggaagctaatcaagcaattaatcccaagttgcttcagttggtcgaagacagaggttcaggtcgttccaggggtagaggaggcatgaaggacgatcgtcgtgacagatactctgcaggcaaaaggggtggatttaatacctttagagacagggaaaactatgacagaggctactctaatctgcttaagagagattttggggctaaaactcagaatggtgtttacagtgctgcaaattacaccaatgggagctttggaagtaattttgtatctgctggcatacagaccagttttaggactggtaatccaacagggacttaccagaacggttatgatagcactcagcaatatggaagtaatgttgcaaatatgcacaatggtatgaaccaacaggcatatgcatatcctgtaccgcagcctgcgcctatgattggctatcccatgccaacagggtattctcaataagactttagaagtatatgtaaatgtctgtttttcataattgctctttatattgtgtgttatcagacaagatagttatttaagaaacatgggaaatgcagaaatgactgcagtgcagcagtaattatggtgcacttttttcgctatttaagttggatatttctctacattcctgaaacaatttttaggtttttttttgtactagaaaatgcaggcagtgttttcacaaaagcaactgtacagtgatttcaaatacaataaatgaaggcaatgcatggccttccaataaaagatatttgaagactgaaaaaaaaaa

SEQ ID NO: 1040 - DNA, 1929 bp, Mus musculus
gagattgaaacaatggaagaactttccatggcaaacaccatgtttgccctcaatctccttaagcagatagaaaaatcaaactctacccagaacatctttatctctccatggagcatctcatcaacattggccatagttctcctcggtgctgggggtaacactgaacagcagatggccaaagtgctgcagtttaatgaaattggcagttatggtatcaccacaagaaacccagagaacttcagtggctgtgatttcgcacaacagatacagaaggaaaattatcctagtgctattttacaggcacaagcaggagataaaatccattcagccttctcctctctcagctcaacaatcaacacaccacagggggattatttgttagaaagtgcaaacaagctgtttggagagaagtctgcaagattcaaagaagaatacatccaactctctaagaaatattactcaacagaaccagaagcagtggacttccttgaatgtgctgaagaagctagggaaaagattaattcttgggtcaagactcaaaccaaaggtgaaatcccaaacctgctacccgaaggttctgtagatgaagacaccaagatggtgctggtgaatgctgtctacttcaaaggaaagtggaaaactccatttgagaagaaacttaatgggctttatcctttccgtgtgaactcgcatgagagcatacctgtccagatgatgttcctccatgcaaagctgaacattggatacataaaggacctgaagactcagatcctagaacttccgcatactggaaacatcagcatgctcctgttgcttcccgatgagattgaggacgcatccactggcttggaattgctggaaagtgaaataaactttgccaacttcaacaagtggatcagcaaagacacactggatgaagatgatgttgtggtctacattcccaagttcaaactggcacaaagctacgaactcaagtccattcttcaaagcatgggcatggaggatgccttcaacaagggcaaggccaacttctcaggaatgtctgagaggaatgacctttttctttctgaggtgttccatcaagccagcgtggatgtcaccgaggagggcactgtggcagctggtgggactggggcagttatgacaggaagaactggccatggtggcccacagtttgtggccgatcatccctttcttttctttatcatggacaaaattacccacacgatactatttgttggtagattctcctcaccctaaaaggggaagacctatttccacatgaggttttgtagcatgaactataagcctcagaattgcatcttcaagtgccaaaagtttaaatactttcttacacatttttatacttctgctatacactaaatataacctaaaagcaattgtatagcagtcttcagtgcttacagtataactctattaatgattttgtttcctaaagtcagatgatgtctatttagttcatccttattactgctttgtctttataactttagtttttacagtgttatttattgtttatataatggttgttttacaaattgttgtcctctgtttaatgaaactgtaacactacagaagcagaaaattagataattttctatttaaagaaaatcagccatttaatttaataatgaaggaaaaatatgagtcttccatactttcccatgatattcacccagaaaaaatgtacttaacaaaagacatgttatatctctatcattatatatcatatgtacgtatctgcaactcatctataattaggactacatcataagtaagcatgcttacttacacactgctatctgttgtataaaacttagcaatccttatttgttagttatctttctatcactgtaacaaaatacctgagataataaagttcaaagatttattttgaaaaaaaaaaaa

SEQ ID NO: 1041 - DNA, 523 bp, Mus musculus
gcccagcttccaacaaatcaaagagggtgcccagaaggtcctcacccacacttcagtgccctgtatccctgggaggacaacgactccgtaaagcgtaaggaggggcgaagagctctggttcttgaggtccagtgggttattacatcgtttcccaagatgtcccatgtgatgctttattattttcataaatgtatgtgaggctcacatattaaccactgttcaaaaataccagtaaggcagaattatgcagaacttttgtgaggtttaatgcacacgtcaagcatatcgcttacattattacatatcttaaccaggtccttttaaaacagacatttacataatgcacaagttatagcaacatcaagggcttttctccccgcttgcaatgaattgttttcttctgtaaggatgttgcggaccagcaggtatcagacttgccaacatggtcggtagactcttcccagcatacacctgagcactgaaagagaacaaacaatgactataaataccatgcagaattgag

SEQ ID NO: 1042 - DNA, 267 bp, Mus musculus
cctccttctcccccacttcaccagatgggcgaaccaacggccaaataaaaaccaccattttcacacaaaaaaataccatccaaacccctcttttacaactttcttcctcatcaattctaagaagttctacactgccttcacctcccaacatctgagatacaagatacaaagattttggataagatggagaaatacctcgtttatatgaaattttcctagttatcttaatgcacacgatgactgtttgcatgtatccctatttataaa

SEQ ID NO: 1043 - DNA, 2451 bp, Mus musculus
ggatccgcggccatgggaaccctgggcaaggcgagagaggctccgcggaaaccttgccatggctccagagctggccccaaagcaagactagaggccaaatcaaccaacagccctctccctgcccagcccagcttggcccagatcacccagttccgaatgatggtgtccctgggacatttggccaaaggagccagcctggatgatcttattgacagctgcattcaatcttttgatgcggatggaaacctgtgtcggaataaccaactgttacaagtcatgctaaccatgcaccggatcatcatctcctcagccgagctgctacaaaaagtcatgaatctatataaggatgccctggaaaagaattctccaggagtttgcctgaagatctgctattttgtcaggtattggataacagaattctggatcatgttcaagatggatgccagcttgaccagcaccatggaagagttccaagacctggtgaaagccaatggtgaggagacccactgccacctcatcgacacgacccaaattaattctcgagactggtccaggaaactgactcagaggataaaatcgaatactagcaagaagcgcaaagtgtccctgctgtttgaccatctggaacctgaagaactgtctgaacacctcacctaccttgagttcaagtccttccgacggatatctttctctgattaccaaaattaccttgtaaatagctgcgtaaaagagaaccccaccatggagaggtccattgccctgtgcaatggcatctcccagtgggtacaactgatggttctcagccgtcccaccccgcagctccgggcagaggtcttcatcaagttcatccatgtggctcagaaactccaccagctacagaacttcaacacgctgatggctgtgatcgggggactgtgtcacagctccatctccaggcttaaggaaacaagttcacatgtcccacatgagatcaataaggttctgggcgagatgactgaactgctgtcctcctgcagaaactatgacaactacaggcgagcctatggggagtgcacccacttcaaaatccccatactgggtgtgcacctcaaggacctcatatccctgtatgaggctatgcccgactatctggaagatgggaaggtgaatgtccaaaagctcctggccctttacaatcatatcaatgaattggtccagctgcaggagatggccccaccattggatgccaacaaggacttggtgcatctgctgacgttatccctggatctatactatacagaagatgaaatctatgagctttcctatgcccgggagccgaggaaccacagagctccgccactgacaccttcgaagccaccagttgtagtagactgggcctctggagtgtctcccaaacctgacccaaagaccatcagcaaacacgtccaaaggatggtggattctgtctttaagaactatgatctcgaccaggatggctatatctctcaggaggagtttgagaagatcgctgcaagctttccattttccttctgtgtgatggacaaagatagggaaggcctcatcagcagagacgagatcacggcctacttcatgagggccagctccatctattccaagctgggcctgggctttccacacaactttcaagaaaccacttacctgaagcccaccttctgtgacaactgtgctggctttctctggggcgtgatcaagcaaggctatcgctgtaaagactgcgggatgaactgccacaaacagtgcaaagacctggtggtgttcgagtgcaagaagcgaatcaagagcccagcaatatccacagagaacatcagctctgtggtaccaatgtccaccctttgtccactgggaaccaaagatctgctccatgcacccgaagaaggatctttcattttccaaaacggagagattgtggaccacagtgaggagagcaaggataggaccatcatgctcctcggagtgtcctcccagaaaatttcagttcggctgaagaggactgttgcccacaagagcacccaaacagaatcgttcccgtgggttggtggcgagacgacccctggtcactttgtgctgtcttctccaaggaagtcggcgcagggcgctctttatgtgcacagtccagcatctccatgccccagcccagcactggtccgaaagcgggcattcgtcaagtgggagaacaaagagtcccttataaaaccaaaaccagaacttcacctccggctccggacctaccaagaactggaacaggaaataaataccctgaaagcagataacgatgctctgaagatccaactgaagtacgcacagaagaaaatagaatccctgcagcttgggaaaagcaatcatgtcttagcccagatggaccacggtgatagtgcttaatccagaatttcaaggaccagaatctgcagacgggtttactgggatgtcgac

SEQ ID NO: 1044 - DNA, 3218 bp, Mus musculus
acactctctcttcaagcctggagtgtcaagtgcctgaccccagtggcaaggcttccagattcttctgaatcaaacctgttatatccaactggaatcctcctggaaaacatacaaagatgagttcttaagaacgtcagaaggaaagagctgatttcttcatccagtcactggataccaagtaaacatcctgatacctctgaggagagccagacgatggattctgtgaataatctgtgcaggcactatgaggagaaggtgcggccctgtattgacctcatcgacaccctgagggctctgggtgtggagcaggacctggccctgcctgccatcgctgtcattggggaccagagttcagggaagagctctgttctggaagcactgtctggagtggccctccccagaggcagtggtattgtcaccagatgccctctggtgctgaaattgaggaagctgaaagaaggagaggagtggagaggcaaagtctcctatgatgacatcgaagtggagctctctgatccttcagaggtggaagaggccattaacaagggtcagaacttcattgctggggtaggcctggggatcagtgataagctcattagcctggatgtcagctccccaaatgtcccagacctgactctcattgacctgcctggaattaccagggtggctgtaggcaaccagcctgcagacataggacgccagatcaagagacttatcaagacatacatccaaaaacaagagaccatcaacctggtggtagtccccagcaatgtggacattgctaccacagaggctctgagcatggctcaggaggtggaccctgaaggggataggaccataggggtcttgaccaagcctgatctggtggacagaggtgctgaaggcaaggtcttggatgtgatgcggaacctggtgtatcctctgaagaagggctacatgatagtcaagtgcagaggtcagcaggacatccaagagcagctgagcctgactgaggcttttcagaaagagcaagtcttcttcaaggatcactcatacttcagcattcttctggaagatgggaaggccacagtgccctgcctggcagagagactgactgaggagctcacctcccacatctgtaaatcactgccactattggaagatcaaataaatagcagtcatcagagtgcaagcgaggagctgcagaagtacggtgcagacataccagaagatgacagaacgaggatgtcctttctggtgaataaaatcagtgccttcaataggaatatcatgaatttgatacaagcacaggaaaccgtatcagagggagacagccggttgtttaccaaactgcgaaatgagtttcttgcttgggatgatcatattgaggaatattttaaaaaagattctcctgaggtacaaagcaagatgaaagaatttgaaaatcagtatcgtggccgggagctgccagggtttgtggactacaaggcatttgagagcatcatcaaaaagcgagtcaaagccctggaagagtctgctgtgaacatgctgcgcagggtcactaagatggtccaaactgccttcgtaaagattttatcaaatgattttggtgattttttaaacctctgctgtactgctaagtccaaaattaaagaaataagattaaaccaagaaaaggaagctgaaaacctgatccgacttcacttccagatggaacagattgtctactgccaggaccaggtttacaaggaaaccttgaagacgatcagagagaaggaagctgagaaagagaagaccaaggcattaataaaccctgctacctttcaaaataactctcagtttcctcaaaaggggttgactaccactgagatgacccagcacctgaaagcctactaccaggagtgcagacggaatattgggagacagatccctctgattatccagtacttcatcctgaaaacatttggggaggaaatagagaaaatgatgcttcagcttttacaggacaccagtaagtgcagctggttcctggaggagcagagtgacaccagagagaagaagaagttcctgaaaaggcggcttttaaggctggatgaggctcggcagaagcttgccaaattctccgattaaccaggctagctatgtggctttcctggtcgctgtgcaatgatcctttagctgctaaccttatgtcagaatgttgcctttagactgtggaagcaagcaagccctttgtaaactctgaggagatgaggagagaggagctatggagagtcattctacttcagcaggaaggcatgaccctctcaaagcctaggaggatggcacctctcaggatcctgctcctaactgtcttttctttgtcaggaggatgtactggctgagcacctcagaagggtcggcttctggttttgtactgtcctgtctggaagcagtgcgagaggtgccacagggtcctggtaggacagctctttgtaggcatacatttttttttgcaaaaattttaacaaggattccacctctcttttagcccaccacccatcagaggtagtggaagagaaaagttattaggctatggaggaagtggacctgttcagcaatagttctttgggggcgagctcagtcttccttggcagcagttcagtcccataacaaacaccaagtatgactcagcagctgcagaccagtcctctaggcaggcagacaccacatacaaccagcagctatagtccagtcctttccacaggcagaaactaagaatgaatcagcagctgaagttcaatcttgatgaaagcttgccatctagcctgaggtgaggctgcagaagcaacaaactgctgcaggaacctcacaagtagttcttaggtgagtttctctcaatgtcggtgttaccacaagtggagctcaaccatgctatgtaaggcaaaccattccatgcatgttgatagtaaagaatagctagacagagcaaaccaagccaaggctccgttgctcatctccgactgtttgtgaggtcatatttatactccttcatcatgggtcctttcatgtatttgcaatgtcatatgaaagcatcctttcagctgtgtctgcttcagggaaacattctttcatgtgtttgcttcagcaagacatcatttcacctgtgtaccccagcaaaacatcatttgatataactaactttccaaggaaactggaagtttccactttagcgcttccaataaaattcttgctaagtg

SEQ ID NO: 1045 - DNA, 1250 bp, Mus musculus
ggcacgaggggcagcagcggaggcggcggctgctccagacacctgcggcggcgaccccccggcggcgcggagatgtggcccttggcggcggcgctgttgctgggctcctgctgctgcggttcagctcaactactgtttagtaacgtcaactccatagagttcacttcatgcaatgaaactgtggtcatcccttgcatcgtccgtaatgtggaggcgcaaagcaccgaagaaatgtttgtgaagtggaagttgaacaaatcgtatattttcatctatgatggaaataaaaatagcactactacagatcaaaactttaccagtgcaaaaatctcagtctcagacttaatcaatggcattgcctctttgaaaatggataagcgcgatgccatggtgggaaactacacttgcgaagtgacagagttatccagagaaggcaaaacagttatagagctgaaaaaccgcacggccttcaacactgaccaaggatcagcctgttcttacgaggaggagaaaggaggttgcaaattagtttcgtggttttctccaaatgaaaagatcctcattgttattttcccaattttggctatactcctgttctggggaaagtttggtattttaacactcaaatataaatccagccatacgaataagagaatcattctgctgctcgttgccgggctggtgctcacagtcatcgtggttgttggagccatccttctcatcccaggagaaaagcccgtgaagaatgcttctggacttggcctcattgtaatctctacggggatattaatactacttcagtacaatgtgtttatgacagcttttggaatgacctctttcaccattgccatattgatcactcaagtgctgggctacgtccttgctttggtcgggctgtgtctctgcatcatggcatgtgagccagtgcacggcccccttttgatttcaggtttggggatcatagctctagcagaactacttggattagtttatatgaagtttgtcgcttccaaccagaggactatccaacctcctaggaataggtgaagggaagtgacggactgtaacttggaagtcagaaatggaagaatacagttgtctaagcaccaggtcttcacgactcacagctggaaggaacagacaacagtaactgacttccatccaggaaaacatgtcacataaatgattactaagtttatattcaaagcagctgtactttacataataaaaaaaatatgatgtgctgtgta

SEQ ID NO: 1046 - DNA, 2424 bp, Mus musculus
acactccgtctccaagccgggaggggtgagtattgcacaggattctgtggaaggatagaggataccttctaaggcttctttgtagacactgagtacccaactgagagaagaaataaaagatggttcttagcacagaagaaaacacaggcgttgattcagtcaacttacccagtggagagacgggcctaggagagaaagaccaggagtctgtgaacaatctctgcagtcagtatgaggagaaggtgcggccctgcattgacctcatcgactccctgcgggctctgggtgtggagcaggacctggccctgcctgccatcgctgtcattggggaccagagttcagggaagagctctgtgctggaagcactgtctggagtggccctccccagaggcagtggtattgtcaccagatgccctctggtgctgaaattgaggaagctgaatgagggagaggagtggagaggcaaagtctcctatgatgacatcgaagtggagctctctgatccttcagaggtggaagaggccatcaacaagggtcagaacttcattgctggggtaggtctggggatcagtgataagctcattagcctggatgtcagctccccaaatgtcccagacctgactctcattgacctgcctggaattaccagggtggctgtaggcaaccagcctgcagacataggacgccagatcaagagactcatcaagacatacatccaaaaacaggagaccatcaacctggtggtggtccccagcaatgtggacattgccaccacagaggctctgagcatggctcaggaggtggaccctgaaggggataggaccatagggatcttgaccaagcccgatctggtggacagaggtactgaagacaaggtcgtggatgtggtgcggaacctggtgtaccatctgaagaagggctacatgatagtcaagtgcagaggccagcaggacatccaagagcagctgagcctgactgaggctcttcagaatgagcaaatcttcttcaaggaacaccctcatttcagagttcttctggaggatgggaaggccacagtgccctgcctggcagagagactgaccgcagagctcatcttacacatctgtaaatctcttcctctgctagaaaatcaaataaaggaaagtcaccagagtgcaagtgaggagctgcagaagtacggtatggacataccagaagatgacagtgaaaaaacgttcttcctgattgaaaaaatcaatgcttttaaccaggacatcactgccctagtacaaggggaagagaatgtggcagagggagaatgtcgcctattcaccaggctccgaaaagagttcttgtcctggagtaaggagatcgaaaagaatttcgcaaaaggttatgctgttttatataatgaagtctgggcatttgaaaagcagtaccgtggacgagaattgccagggtttgtgaattacaaaacatttgagaacattataagaagacaaatcaaaaccctggaagaaccagctatagaaatgctgcacacggtcactgaaattgtacgagctgcctttacaagtgtttctgagaaaaatttttctgagttttataacctccacagaactaccaagtccaaacttgaagacatcagattagaacaagaaaaggaagcagagatgtcaatccgactccacttcaagatggaacaaattatctactgccaggaccagatttacagaggagccttgcagaaggtcagagaggaggaagctgaggaggagaagaagacaaagcatggcacttccagttcctctcagtcccaagatttacagacctcatccatggctgagatcttccagcatctgaatgcctaccgccaagaggctcacaaccgcatctccagccacgttcccttgatcatccagtatttcatcctgaaaatgtttgctgagcggctgcagaagggcatgctccagctcctgcaggacaaggattcctgcagctggctcctgaaggagcagagtgacacaagcgagaagaggaagttcctgaaggagaggctggcaaggctggcccaggctcggcgccggctagccaaattccctggttaagctggctctgtccttccctgtgtttcctggattgtgattcagggacagaagggctcctgcctttcctggtagctataccaccagcctttatgctctgataagtgctagcactcagatttgaaggagctttctgctcactctgagataggaagagaaagaggctctcaaagctcagcaagtagatgggtagaggaagccactttgctaataagacaacggcttcacctgagtactcttcttgcccaccatttagcacactgccagaaataaatatttgatgtacaaatgggagctgcctgttacattccttaataaaccacttttctttaaaaaaaaa

SEQ ID NO: 1047 - DNA, 299 bp, Mus musculus
tttttttttttttttttttttacatacacagcatttttattaaatatacttcgtgagaaaaagaacaccttaaagtgctaaattccatgtaaatcagattgttttagtaaatatgacagcgagaaaaatcagagaggtttgatttaaataatctcaggaaaggagcggaagcattgtgtcttcatataagaaaacaatcaccaaaatataaaaggcgaagacatttcatgtagaagaatatatttcagaatcccacctgtcagtacttcatttataaaagtctaccctaaacacacaga

SEQ ID NO: 1048 - DNA, 1580 bp, Mus musculus
cagttcctcagcatggccacctgcagccgccagttcacctcctccagctccatgaagggctcctgtggcatcggtggtggctctagccgcatgtcctccatcctggctggaggatcctgccgggctcccagcacctgcgggggcatgtcagttacctcctctcgcttctcctctgggggagtctgtgggattggaggtggctatggtgggagcttcagcagcagcagttttggtggaggacttggtagtggatttggtggtcgatttgatggatttggtggtggttttggtgctggtcttggtggtggtcttggcggtggtattggtgatgggctcctggtgggcagtgagaaagtgaccatgcagaacctcaatgaccgcctggccacctacctggacaaggtgcgtgccctggaagaggccaacagagacctggaggtgaagatccgggactggtaccagaggcagcggcccactgagatcaaagactacagcccctacttcaagaccattgaggacctgaagagcaagatcattattgccacccaggagaatgcacagttcactttgcagattgacaatgccaggctggcagctgatgacttcaggaccaagtacgagaatgagctgttcttgcggcagtccgtggagggtgacatcaatggcctgcgcaaggtgctagatgagctgaccctgtccagagctgacctggaaatgcagattgaaaacctcagagaagagctggccttcctgaagaagaaccatgaggaggagatgcttgccttgaggggtcagactggtggggacgtcaatgtggagatggacgcagcccccggtgtggacctcagccgcattctgaatgagatgagggaccagtatgagcagatggcagagaagaaccgcagagatgtggaggcctggttcctgagaaagactgaggagctgaacaaagaggtggcctctaacagtgatctaatccagagcaaccgcagcgaggtggctgagctccgcagggtgttccagggcctggagattgaactgcagtcccagctcagcatgaaagcatccttggagaacagcctagaagagaccaaaggcagatactgtatgcagctgtcccagatccagggtttgatcagcagtgtggaggagcagctggctcagcttcgctgcgagatggagcagcagagccaggagtacaacatcttgttggatgtgaagacaaggctggagcaggagatcgccacctaccgccgtctgctggatggcgagaatatccactcctcctcacagcactcctctggacagtcctattcttctcgagaagtcttctcctcatcctcccgccagccccggtccatcctcaaggagcaaggttcaaccagcttcagccagagccaaagtcagagttccagggactaatgttttgcctagagcctcctcacccacaactgcctctcaagctgagggcttggggcaggaccctgttttctttgcgcattccccatctgtctcccctaccctctcatggtggtaggctaataaagctttttggttgatgcaaaaaaaaaaaaaaaaaa

SEQ ID NO: 1049 - DNA, 2277 bp, Mus musculus
caggatgtcacagtggttcgagcttcagcagctggactccaagttcctggagcaggtccaccagctgtacgatgacagtttccccatggaaatcagacagtacctggcccagtggctggaaaagcaagactgggagcacgctgcctatgatgtctcgtttgcgaccatccgcttccatgacctcctctcacagctggacgaccagtacagccgcttttctctggagaataatttcttgttgcagcacaacatacggaaaagcaagcgtaatctccaggataacttccaagaagatcccgtacagatgtccatgatcatctacaactgtctgaaggaagaaaggaagattttggaaaatgcccaaagatttaatcaggcccaggagggaaatattcagaacactgtgatgttagataaacagaaggagctggacagtaaagtcagaaatgtgaaggatcaagtcatgtgcatagagcaggaaatcaagaccctagaagaattacaagatgaatatgactttaaatgcaaaacctctcagaacagagaaggtgaagccaatggtgtggcgaagagcgaccaaaaacaggaacagctgctgctccacaagatgtttttaatgcttgacaataagagaaaggagataattcacaaaatcagagagttgctgaattccatcgagctcactcagaacactctgattaatgacgagctcgtggagtggaagcgaaggcagcagagcgcctgcatcgggggaccgcccaacgcctgcctggatcagctgcaaacgtggttcaccattgttgcagagaccctgcagcagatccgtcagcagcttaaaaagctggaggagttggaacagaaattcacctatgagcccgaccctattacaaaaaacaagcaggtgttgtcagatcgaaccttcctcctcttccagcagctcattcagagctccttcgtggtagaacgacagccgtgcatgcccactcacccgcagaggcccctggtcttgaagactggggtacagttcactgtcaagtcgagactgttggtgaaattgcaagagtcgaatctattaacgaaagtgaaatgtcactttgacaaagatgtgaacgagaaaaacacagttaaaggatttcggaagttcaacatcttgggtacgcacacaaaagtgatgaacatggaagaatccaccaacggaagtctggcagctgagctccgacacctgcaactgaaggaacagaaaaacgctgggaacagaactaatgaggggcctctcattgtcaccgaagaacttcactctcttagctttgaaacccagttgtgccagccaggcttggtgattgacctggagaccacctctcttcctgtcgtggtgatctccaacgtcagccagctccccagtggctgggcgtctatcctgtggtacaacatgctggtgacagagcccaggaatctctccttcttcctgaaccccccgtgcgcgtggtggtcccagctctcagaggtgttgagttggcagttttcatcagtcaccaagagaggtctgaacgcagaccagctgagcatgctgggagagaagctgctgggccctaatgctggccctgatggtcttattccatggacaaggttttgtaaggaaaatattaatgataaaaatttctccttctggccttggattgacaccatcctagagctcattaagaacgacctgctgtgcctctggaatgatgggtgcattatgggcttcatcagcaaggagcgagaacgcgctctgctcaaggaccagcagccagggacgttcctgcttagattcagtgagagctcccgggaaggggccatcacattcacatgggtggaacggtcccagaacggaggtgaacctgacttccatgccgtggagccctacacgaaaaaagaactttcagctgttactttcccagatattattcgcaactacaaagtcatggctgccgagaacataccagagaatcccctgaagtatctgtaccccaatattgacaaagaccacgcctttgggaagtattattccagaccaaaggaagcaccagaaccgatggagcttgacgaccctaagcgaactggatacatcaagactgagttgatttctgtgtctgaagtccacccttctagacttcagaccacagacaacctgcttcccatgtctccagaggagtttgatgagatgtcccggatagtgggccccgaatttgacagtatgatgagcacagtataaacacgaatttctctctggcgaca

SEQ ID NO: 1050 - DNA, 1790 bp, Mus musculus
gggcctcagcaacgcagtagtcgacagacttcaggctggggtgtggagccccggccaccgccgccactgacgacccccgccccccacatgcagcgccgcccctctgtggctgcccgtgaagcaaggctgccaagccccggctccgcctgcctccctacctcgcggctttctgcgtcctcgccgagcgggcgcgatgcggctgggcccaaggcccgcggcgctaggactgctgctgccgctgctgctgtacgccgcggtggctggcgccagcaaggcggaggaactgcactacccgcagggcgagcaccgggcggactacgaccgcgaagcgctgctgggtgtccaggaagacgtcgatgagtatgttaaacttggccacgaagagcagcaaagacgattgcagtcgatcataaagaaaattgactcggactctgatggctttcttactgaaaatgaactcagtcagtggattcagatgtcttttaagcattacgctatgcaagaagccaagcagcagtttgtggagtatgataagaacagcgacggcgatcctgtgacgtgggatgagtacaacatccagatgtacgaccgggtgattgactttgatgagaacactgctctggatgacacagaagaggggtcgttcaggcagcttcatctaaaggataagaagcgatttgaaaaagctaaccaggattcaggtcctggtctgagtcttgaagagttcattgcgtttgagcaccctgaagaagttgactatatgacggagttcgtcatccaagaggctttggaagaacatgacaaaaatggcgatgggtttgttagtttggaagaatttcttggcgattacaggcgggatccaactgcaaatgaagacccagaatggatacttgttgaaaaggacagatttgtgaatgattatgacaaagataatgatggccggcttgatccccaagagctgttgtcatgggtagtgcccaataaccagggcattgcacaagaggaagctcttcatctgattgatgagatggatttgaatagtgacaaaaagctctctgaagaagagattctggaaaaccaagacttgttccttaccagcgaccagacggattatggccgacagctccatgacgactacttctatcatgacgagctttaaccccccgagtgcgcccccagcaggatcggccttctgtagtttgctaccagttgactttttatgatgagatatagatgttgtcttttacactcttaagtcttaccacttcagatgatctaaacgcagattataacttttggccttttcaaagaaaacaaaacaagaacttgtcatttatttcaagacatattgaaggagtaaactattaatgttgtgccatatgaccacacagtctttcctaagtactccatctatgtagtgctgtgttgtggaatgttgagctctgttgccatacttgaagacatggaggatttagacatgtctaaacaatagtatttaagtagcacgtgatgaagctgtcagttttcgttcttgtactagtagacttacttttgaaactgacaaaggacagtgtttagatttagtgttttatcttaaagcctttaaaggaaccttcacaaggacttaaacctcacatagatgttgagaagttctacttaattttaaaatggtttctaaaaagggttttgtcgtatgaaatagaactttatatttttgcatatgtatagatagtaattatatttaatgtataactatagcattatggtgtgtggaaattgacattgtccag

SEQ ID NO: 1051 - DNA, 427 bp, Mus musculus
  misc_feature (19)..(19): "n" = a, t, g, or c.
tttttttttttttttgtanctgatgaaatcatggaaccctccactcataatcatgtctacagagctctaggtaccttttgacaggtggaataaagtctcaaatctttagaaaggtagactgtaatcacatacccttaatctgtaaaacacagagttcatctgtggattccacattgtaactgtctatctctccagttcccttttttctgaggtcacctcttatgtcaataagcactcctgtcgaactactcagaggggtgttgcagtggcagaactggactgcccaggacttcccagccagggccctaaaacaaaacaaaaaaacaaacaaacaacaacaacaaaaaacccaaccccctactccccaacccaacctaaggtcttgttgaccttaaatttaagggcttgttgaccttaaattggtgtc

SEQ ID NO: 1052 - DNA, 1049 bp, Mus musculus
gactgtgcgccggaaggaggctcttatagcgcttttggaattatggcggcggtggatatccgagataacctgctggggatctcctgggttgacagctcttggatccccatcttgaacagtggcagtgtcctggattacttttcagaaagaagcaatcccttctatgacaggacgtgttataatgaggtggtcaaaatgcagaggctgacattagagcacttgaatcagatggttggaatcgaatacatccttttacatgctcaagagcccattcttttcatcattcgaaagcaacagcggcagtcccctgctcaagttattccactggctgattactatatcatcgctggagtcatctatcaggcgccagacttgggatcagttataaactccagagtgcttactgcagtgcatggaattcagtcagcttttgatgaagctatgtcatactgtcgataccatccttccaaaggatattggtggcactttaaagatcacgaagaacaagagaaagtcaaacctaaagccaaaaggaaagaagaaccaagctctatttttcaaagacagcgtgtggatgctttactcatagaccttagacagaaatttccacccagatttgttcagcaaaagtctggagaaaagcctgtcccagtggatcaggcaaaaaaaagaggcagagcctttgccagaaactgtaaaatctgaggagaaggagagcacaaagaacattcagcagactgtgagcactaaaggtccccctgagaaacgaatgagactccagtgaatgttggacgaggaagaagctggccagctccttgtcagtcgctatacctcagcaccgtgggaggctcttgagcctggaaacactatcgcagtttgtacggaatgcacttgttctttacaaaaggacgttctccctaccatgttttctatgtgaatatttcttaaatatcttttgtaatctttcctctactggacttgggcagtgcacctaactcacagatatgccagtatatatctttaaaacaataaagttatttgtatatatt

SEQ ID NO: 1053 - DNA, 1830 bp, Mus musculus
ctccggtaccagggtccagcctgtgacagcccatccaggctcggacgctggattaacacctgtgacatcacgtgtgcgctcccgctgcatctgtagtcacatctacagccaccttggcagaggaatctacactgagttctgaacctaggtgaccacaagttctcaaacctcatctgtgaccctcaacaccctaatacctgggtcacacttgtgaaactgaaattcctacctgttaccaacacttgtaacgtttaaaacacatttgtgaaacttggtcacactatctgtggctacaacctaaaaccatagaggcacccaaggggccttatttgcaatagctgactgctccagtgactacaaggcatcacagagtagtagcatctactttgattctcccagactgcctgtgtagacggagcaatggctgaagtgaggggggtccagcgagtgctgtttggagactggctattgggggaggtcagcagcggccagtacgaggggctgcagtggctgaacgaggctcgcacagtcttccgcgtaccctggaagcatttcggtcgtagggatctggatgaagaagatgcacagatcttcaaggcctgggctgtggcccgagggaggtggccacctagtggagttaacctgccacccccagaggctgaggctgctgagcgaagagagcgaagaggctggaagaccaacttccgctgtgcactccacagcacagggcgttttatcttgcgccaagacaattcaggggatccagttgatccgcataaggtgtacgaacttagccgggagcttggatctactgtgggcccagccacggaaaatagggaagaagtgagcctcagcaatgctctgcccacacagggtgtgtccccaggatcatttctggcaagagaaaatgctgggctccaaaccccaagccctctgctttctagtgatgccggggacctcttgcttcaggttctgcagtacagccacatactggaatccgagtctggggcagaccccgtcccaccacaggctcctggccaggagcaagaccgtgtttacgaggaaccctatgcagcatggcaggtggaagctgtccccagtcccaggcctcaacagccagctctcaccgagcgcagccttgggttcctggatgtgaccatcatgtacaagggccgcacagtgctacaggcagtggtggggcaccccagatgcgtgttcctgtacagccccatggccccagcagtaagaacttcagagccccagccggtgatctttcccagtcctgctgagctcccagatcagaagcagctgcactacacagagacgcttctccagcatgtgtctcccggccttcagctggagcttcgaggaccgtcactgtgggccctgcgtatgggcaagtgcaaggtgtactgggaggtaggcagccctatgggcactaccggcccctccaccccaccccagctgctggagcgcaaccgccacacccccatcttcgacttcagcactttcttccgagaactggaggagtttcgggctcggaggcggcaagggtcaccacactacaccatctacctgggttttgggcaagacttgtcagcagggaggcccaaggagaagaccctgatcctggtgaagctggagccatgggtatgcaaggcatacctggagggcgtgcagcgtgagggtgtgtcctccctggacagcagcagtctcggcttgtgcttgtctagcaccaacagtctctacgaagacatcgaacacttcctcatggacctgggtcagtggccttgactcagaatcccaactcccaataaatagttcaaaatc

SEQ ID NO: 1054 - DNA, 1389 bp, Mus musculus
atgcagctgagaaaaatgcagaccatcaaaaaggagcccgcacccctagatcctaccagcagctcagacaagatgctgctgctgaactctgccttagctgaggtggccgaggacctagcctcaggtgaagatttgctcctgaacgaagggagcatggggaaaaacaaatcctcggcgtgtcggagaaaacgggaattcattccggacgagaagaaagacgccatgtattgggagaaacggcggaaaaacaacgaagctgccaaaagatctcgggagaagcgccgcctcaatgacctggttttggagaacaagctgattgccctgggagaagaaaatgccactttaaaagctgagctgctctccctgaaattaaagtttggtttaattagctccacggcgtatgcccaagaaatccagaaactcagtaattccacagctgtctactttcaggactaccagacatccaaggctgccgtgagctcttttgtggacgagcatgagcctgcgatggtagccggaagttgcatctcagtcatcaagcactctccccagagctcgctctccgatgtgtcagaggtgtcctcggtggagcacactcaggaaagccccgcacagggaggctgccggagccctgagaacaagttccctgtgatcaagcaggagcccgtggagttggagagctttgccagggaggccagggaggagcggggcacgtattccacctccatctaccagagctacatgggaagctctttctccacttactcccactccccacccctcttgcaggtccatgggtccactagcaactccccaagaacctcagaggccgatgagggtgtagtgggcaagtcttctgatggggaagacgaacaacaggtccctaagggccccatccattctccagtggagctgcaacgggttcacgccacggtggtgaaggttccggaagtgaacccttctgccttaccgcacaagcttcggattaaagccaaggccatgcaggtcaaagtggaggctttggacagcgagtttgaaggcatgcagaaactctcttcacccgccgatgcgatcgccaaaagacattttgacctggagaaacatggaacctcgggtatggcccattcctccctccctcctttctcagtgcaggtgacgaacattcaagattggtccctcaaatcggaacactggcatcacaaagaactgagcagcaaaactcagagtagcttcaaaacaggtgtggtggaagtcaaagacggtggctataaggtttccgaagctgagaatttgtatttgaagcagggaatagcaaacttatctgcagaggtggtctcgctcaagagattcatagccacacaaccgatctcggcttcggactccaggtaa

SEQ ID NO: 1055 - DNA, 3086 bp, Mus musculus; identical to SEQ ID NO: 13

SEQ ID NO: 1056 - DNA, 1813 bp, Mus musculus
gcgctaggctgggaccttgaagcctggagcgcctacccggcagctctgagagagacaccttgaactaccatcctgccttctggtaagcacctaaccatgtccctggctgaggccatcagactctggaatgaaggggtgctcgcagccgacaagaaggactggaagggtgccctggaggccttcagcgaggtgcaggacccccactcgaggatttgcttcaacataggctgcgtgaacactatcctggaaaacttgcaggcagccgagcaggccttcaccaaaagcatcaacagagacaagcactctgcagtggcctacttccagagaggaatgctctactacagaatggagaagtacgaccttgctatcaaagaccttaaagaggccttgacgcagcttcgtgggaaccagctgatagactacaagatcctggggctgcagttcaagctgtttgcctgtgaggtattgtacaatattgctctcatgcatgccaagaaagaggaatggaagaaagcagaagagcagttggcattggcaaccaacatgaagtccgagcccaggcattccaagatcgacaaggccatggagagcatctggaagcagaagctgttcgagcccgtggtgatccctgtgggtcggctgttccgtccaaatgagaggcaggtggctcagctggccaaaaaggactatctgggcaaggctacggttgtagcatctgtggttcaccaagacaacttttctggcttcgcccctctgcagccacagtcagcagagcctcctcccagacccaaaaccccagaaatcttcagggctctggaaggtgaggcacaccgcgtattgtttggctttgtgccggagacgccagaagagctacaggtcatgcctgggaacatcgtctttgtcttgaagaagggcagtgataactgggccacagtcatgttcaatggacagaaggggcttgtcccctgcaactacctggagccagttgagcttcggattcaccctcagtcgcagccccaggaagatacctctccagaatccgatattccaccacctcctaattctagccccccaggaagactccagttgtcaccaggtcacaagcaaaaagagcccaaggaactgaagctcagcgtgcctatgccttacatgctcaaggtgcattacaaatacacagtggtcatggagacgcggcttggcctcccctacagccagcttcggaacatggtgtctaagaagctggcgctctcgccagaacacactaaactgagctaccggcgtcgggacagccacgagcttctgctcctgtccgaagaaagcatgaaggatgcctggggccaagtgaaaaactactgcctgactctgtggtgtgagcatacggtgggtgaccaaggtcttattgatgaacccatacaaagggaaaactcagacgccagtaagcagactacggagcctcagcctaaggaggggacccaggtggtagcaatcttcagttatgaggctgcccagccagaagacctggaatttgtggaaggagatgtaatcctggtactgtcacatgtgaatgaagaatggctggaaggggagtgtaaagggaaagttggcattttcccgaaggcttttgttgaaggatgtgcagccaagaatttggaaggcattcccagagaagtctaggatctacaaagctgaagcaaagtgttgtttttccccttgcaagacttacccatctctgctgtgcgctatacagacacaccagtttggaaatgtggcctaacttaccatttccctattaaaattgaacctgtcacacagc

SEQ ID NO: 1057 - DNA, 563 bp, Mus musculus
  misc_feature (20)..(20): "n" = a, t, g, or c.
tttttttttttttttttaanttttctacttaacttttaataaatgagaagaaacacagtagtcttgtctcatatagaacatttatagtacataacaatccataaagcctcatggtgaggtaggaacagctttggaaataacacacagtcataaaacacacacaagttagggaaaaggttgccgcactcgagttcaagatgagccccatcaactatgcctgtggcccagagcacaggcggcagtagacaggaccaactcgagagcgtctcagagaatcagacacactgacaccccattgtgctgtttcaaggcagacccatatcatggccatttgtgtctttttatataaccacatatcaattctatgttacattctcctcagcatctttttttgcctgacactgaaccttaacatttttggtttaaaagtttaaattgattaatatacaaaaggctcttgtgccagtgaaaatgactgctaaatattccagagcttgttagtaaaacaaaacaagatcagcatatacatacacatatgtttatatgcagcactgtatcaaaat

SEQ ID NO: 1058 - DNA, 2373 bp, Mus musculus; identical to SEQ ID NO: 956

SEQ ID NO: 1059 - DNA, 861 bp, Mus musculus
ggcctgtggggctttccactggaacgatggctacctacagtctggcgaacgagcggctgcgcgccctggaggatatcgagcgtgaaatcggcgccatcctccagaacgcaggaacggcgatcctggaactgtccaaggaaaagactaacgagcggctcctcgaccggcaggcggcagccttcaccacttctgtgcagcacgtggaggcagagctatccgctcaaatccgctacctcactcaggtggccacagggcagccgcatgagggctccagctactcttccaggaaggactgtcaaatggctctaaagcgagtagactacgcccgcctcaagattagtgatgtggtgagaacctgtgagcagatgctggagaactgagttcggatgatccagagtgtgccctgcaccagagaccgtaggatggggagcagtgcatcatacacgtgccctactggtcagggcagacgaggaccacaaggcagaaaggagaactgaagaatccaaagccccagtgtacacacatctcttctgactcttccagcaagacggccctgttttccactatgcaagatcagacagaggtcagaggtcaactcccaacccacttcctcatgtgcaccctgccctggagtttcagaagacttggcccaataaaaataaatgtgttcttataagcacacacagtggctcacacctgtaggcccggtacttgggaagtagaggtgggaagattgctgtagtttgagaccaacctgggctaagtacatagagggaccctccttcaaaaggggaagttatgttcctcattggaagaaacaaaacaggaactaagtgtttaataataaaagctgtatttttt

SEQ ID NO: 1060 - DNA, 741 bp, Mus musculus
atgaggcggggctttggacccttgtctcttgcgttcttccttttcttgttggcgctgctgaccctgccaggcgatggcaaccagggcagtgtcgctggaagttgttcttgtgatcgtaccatttcttctggcacccagataccgcagggtactttggatcacatccgaaaatacctgaaagcatttcatcgttgtccattctttatcaggttccagttgcagtccaaaagcgtgtgtgggggaagccaagaccagtgggtccgtgaactagtggactgctttgagcgcaaagagtgtggaactggtcatgggaagagttttcaccaccaaaaacatttgcctcaagccagtacccagacccctgaggccgcagaggggacaccttcggacacgagcacccctgcacatagtcagagcactcagcactccactcttccatcaggagcactgtccttaaacaaagagcacacccaaccctgggagatgaccactctcccttcaggctatggtctggaagctaggcctgaggctgaggcaaatgagaaacagcaagatgacagacagcaagaagcaccaggagctggagctagcacaccagcttgggtaccggtgctgtccctcctggccattgtcttcttcctcactgcagccatggcctatgtgctgtgcaacaggagagcgacacagcagaactctgcaggtttgcagctctggtacactcctgttgaaccaagaccctag

SEQ ID NO: 1061 - DNA, 3123 bp, Mus musculus
acgcgcgggggaacatggcggcggcgggtgttgtgagcgggaagattatatatgaacaagaaggagtatatattcactcatcttgcggaaaggcaaatgaccaagacagcttgatttcaggaatattgcgtgttttagaaaaggatgctgaagtaatagtggactggagaccattggatgatgcattagattcttccagtattctgtgtgctggaaaggactccagctcagtcgtagagtggactcaggctccaaaggaaagagctcatcgggggtcggaccagcagagcagctatgaagcggagtgggacatggttactacagtgtcctttaagaagaaaccacacaccaatggagatgctccaggccataggaacgggaaaagcaaatggtcgttcctgttcagcctggcagacctgaagtcagtcaagcagagcaaggagggcatgggctggtcgtacctggtcttctgcctgaaggatgacgtcatgctgcctgccctgcacttccatcaaggagacagcaaactgctgatcgagtctcttgagaaatacgtggtattgtgtgagtcaccacaagatagtagaacacttctagtcaattgtcagaataagagtctctcacagtcttttgaaaatcttcttgatgaaccagcatatggcttaatacaaaaaattaaaaaggatccttatacagcaaccatggtaggattttccaaagttacaaactacatttttgacagtttgcgaggcagcgatccctctacacatcaacgaccaccttcagaaatggcagattttcttagtgacgctatcccaggactcaagataaaccagcaagaagagccaggatttgaagtcatcactagaattgatttgggagagcgacctgttgtgcaaaggcgggagccagtgtccctggaagaatggaacaagagccttgaccctgaaggaagactcgtagccgtggagagcatgaagcaaaagatattcagagggggtcttagtcattcattaagaaagcaagcatggaaatttctcctgggttattttccttgggatagtaccaaagaggaaagaactcagttacaaaaacaaaaaactgatgagtacttcaggatgaaactgcagtggaagtctgtcagtgaggctcaggagaagagaaactcacgcctgagagactacagaagtctgatcgagaaagatgtcaacagaacagatcgaacgaacaagttttatgaaggccaagataacccagggctgattctgcttcacgacattttgatgacctactgtatgtatgactttgatttaggatatgtacaaggaatgagcgacttactttccccacttttgtatgtgatggagaatgaagtggatgccttttggtgctttgcctcttacatggaccagatgcatcaaaattttgaagaacaaatgcagggcatgaagacgcagttaatccagttgagtaccttactcaggttactggacagtggattttgtagctatttagaatcccaggactctggatatctatatttttgcttcagatggcttttaatcagatttaaaagggaatttagttttctagatatacttcgattatgggaggtaatgtggactgaactgccctgtaagaattttcatcttcttctgtgttgtgccatcctggaatcagaaaagcaacagataatggcaaagcactatggcttcaatgaaatccttaagcacatcaatgagttgtccatgaagattgatgtggaagatatactctgtaaagcagaagcaatttccctacagatggcacaatgcaaggaattgccacaagcagtttgtgagatcctgggacttcaggacagtgaaattacaacgccagattccgacactgatgaaaatgttggcagcccttgtcctgtatctgcgtttccaagtagcaccttgcccatccttgctgccagtgaagccaaagatgacagtccaacacagacattagcatccccgaatgcctgcagattaacacctgcatgatcatttgtcttacagtttttgagatactttgttgcaattcctttttaagtacatgaaagatagacattcacggtcttggtattgatcatgctttaagttttatggagagacagtgtactgatgttcttgcattaaagctttacaaagttttaaactaattatttttgtagttacttctaccaaatagcctttccttttcaataacattccttagtatttttatagccaagcacattttattttgttgctgatgaactgggattggataaatacttcaagtggaagctttggaaattatgcacttggaaaagcactcactgtttattctttagagggctttggacttgattacattaaatgttgagcctttataaagcattctaagctgagaagtacattgttactcagagatgaaatttaaaatacaaatttggcttttctattgtttacaacaatattcagcttaactatttatgctggttgaatgtgatttaaataagacatttttaccaacgtagttaaacgtgtggataaagaactgtttcaaccttagcaactggattggcagtctgggttttttacaaagaacttttcttcacttgtatataggctatatatatgtactatttatgagtataagaaagcatagtcctattttctttaactgaataaacttgactattgatttatataagctgattcaacaaaattaatacatggcttcaatataagatctttttcaaaactattttcttaactgaacatttatttaatgagactacattgagccctgtctatacctggtataaatcactgtaacctctttactaataatgtttattatctttcctaatactgcactaattggttaatcagatcgttacatttttaaaaatattctttgcaaaaagcttatgtcagaagtttccaggcactgtcatgagtcggaaaggaatatttttttgtatatgaatgaagctgtttttaccatgcagtgttgcatgtttttaagttctgtggaattgccataacaaattccgttttaattgtaatttgttaactcttgtacatatcattaaatgaaatcaaagct

SEQ ID NO: 1062 - DNA, 2408 bp, Mus musculus
ccagaaccgtcgtcgcgtttcggggccacagcctgttgctggactcctaagactcctgcctgactgctgagcgactggtcctcagcgccggcatgatgaagttcactgtggtggcggcggcgttgctgctgctgggcgcggtgcgggccgaggaggaggacaagaaggaggatgtgggcacggtggtcggcatcgacttggggaccacctattcctgcttcggtgtgttcaagaacggccgcgtggagatcatagccaacgatcagggcaaccgcatcacgccgtcgtatgtggccttcactcctgaaggggagcgtctgattggcgatgcggccaagaaccaactcacgtccaaccccgagaacacggtcttcgatgccaagcgcctcatcggacgcacttggaatgacccttcggtgcagcaggacatcaagttcttgccattcaaggtggttgaaaagaaaactaaaccgtacattcaagttgatattggaggtgggcaaaccaagacatttgccccagaagaaatttctgccatggttctcactaaaatgaaggagactgctgaggcgtatttgggaaagaaggttacccatgcagttgttactgtaccagcttacttcaatgatgcccagcgacaagcaaccaaagatgctggcactattgctggactgaatgtcatgaggatcatcaatgagcctacagcagctgctattgcatatggcctggataagagagagggagagaagaacatccttgtgtttgacctgggtggcggcaccttcgatgtgtctcttctcaccattgacaatggtgtctttgagtgggtggccactaatggagatactcacctgggtggggaagactttgatcagcgggtcatggaacacttcatcaagttgtacaaaaagaaaactggtaaagatgttaggaaagacaacagagctgtgcagaaactccggcgtgaggtagaaaaggctaagagagccttgtcttctcagcatcaagcaaggattgaaattgagtccttcttcgaaggagaagacttctcagagacccttactcgggccaaatttggagagctgaacatggacctgttccgctctaccatgaagcctgtccagaaagtgttggaagactctgatctgaagaaatctgatattgatgaaattgctctggttggtggatctactcgaattccaaagattcagcaactggtgaaagagttcttcaatggcaaggagccatcccgtggcataaaccccgatgaggctgtagcctatggtgccgctgtccaggctggtgtcctctctggtgatcaggatacaggtgatctggtactgcttgatgtgtgtccccttacacttggtattgaaactgtgggaggagtcatgacaaaactgattccaaggaacactgtggtacccaccaagaagtctcagatcttctccacggcttccgataatcagccaactgtaacaatcaaggtctatgaaggtgaacgacccctaacaaaagacaatcatcttctgggtacatttgatctgactggaattcctcctgctccccgtggagttccccagattgaagtcacttttgagatagatgttaatggtattctccgagtgacagctgaagacaaaggtacaggaaacaaaaacaaaatcacaattaccaatgaccaaaaccgcctgacacctgaagaaattgaaaggatggttaatgatgctgagaagtttgctgaggaagacaaaaagctcaaagagcgcattgacaccaggaatgaattggaaagctatgcttattctctcaagaaccagattggagataaagaaaagctgggaggtaaactttcttctgaagataaagaaaccatggaaaaagctgtagaggaaaagattgaatggctggaaagccaccaggatgcggacattgaagactttaaagccaaaaagaaggaactagaagaaattgttcagccaattatcagcaaactctatggaagtggaggccctcccccaactggtgaagaggatacatcagaaaaagatgagttgtaggtgcactgatctgctagagctgtaatattgtaaatactggactcaggaactttcgttgggagaaaattgagagaacttaagtctcgaatgtaattggaatcttcacctcagagtggagttgaaaatgctatagcccaagtggctgtttactgcttttcattagcagttgctcacatgtcttggggtcagggagaggaggaattggctattttaaaaattgagaaaaaggtgggtcagggtgtgtgttcaccttggatatggtctatttaacaattgggtcatgcacatgtggtgtaggaacttttttctaccataagtgacaccaataaatgtttgttatttacactg

SEQ ID NO: 1063 - DNA, 1818 bp, Mus musculus
cgcagcggcagggcggggccggtggggcgggcggaggaagacccctgattgccacctcgcctccctcagtgtctctcttagaccttggtcacgtaccggggtccggaggacttgtgtacagcggcaatgggcggtgtcggggagcccggagggggacccgggccgcgggaggggcccgcaccgctgggggcgcccctacccatcttccgctgggagcagatccgccagcatgacctaccaggcgacaagtggctggtcatcgagcgccgtgtctacgacatcagccgctgggcacagcggcacccagggggtagccgcctcatcggccaccacggtgcggaggacgccacggatgccttccacgccttccaccaagatctccattttgtgcgcaagttcctgaaacccctgttgattggagagctagccccagaggaacccagccaggatggagctcagaatgcccagctgatcgaggacttccgagccttgcgccaggcagctgaagacatgaagctgtttgaagctgataccactttctttgcactcctgctgggccacatcctggctatggagttgttggcctggcttatcatctacctcttgggccctggctgggtgtccagtatccttgctgccctgatcctggccatctctcaggcccagtgctggtgtctgcaacatgatctaggtcatgcttccatcttcactaagtccaggtggaaccatgtggcccagcggttcgtgatggggcagttgaaaggcttttccgcccactggtggaatttccgccacttccagcaccatgccaaacccaacatcttccacaaagacccagatgtgactgtcgcacctgtcttcctcctgggggagtcatctgtggagtatggcaagaagaaacgcagatacctgccctacaaccaccagcatctatacttcttcctgattggccctccgctgctcaccttggtgaactttgaagttgaaaatctggcgtacatgctggtgtgcatgcagtggacggacttgctgtgggctgccagtttctactcccgctttttcttgtcctactctcccttctatggtgccactgggacactgctcctctttgttgctgtcagggtgctggagagccactggttcgtgtggatcacgcagatgaaccacatccccaaggagattggccatgaaaagcatcgggactgggcaagctctcagctggcagccacctgcaatgtggaaccttcgctcttcattgactggttcagcgggcacctcaatttccagattgagcaccacctcttccccacgatgccaaggcacaactaccggagggtggcccccctggtcaaggcgttctgcgccaagcacggcctacactacgaggtgaagcctttcctcaccgctctggtggatatcatcgggtccctgaagaagtctggcgacatctggctggatgcatacctccatcaatgaaggcagcacccttatgggtggtgaaggggtaagggtccagactccagcagtcaccgagtcactgggcaagattgacagtcatcctcaccccctgctggggcagcctgtctgcccgcctggtcctgctggctttcctcagtcctcagcattttctggtcagcaatcctatggccatggcacatgtccaacaggaccagggtggagggaacatacttaaaatgacacggtgagcatagcatgttttcctagagcaagaactggaaggaaaacttgttatttttatataaaaagcaacccagacacatggaaaaaaaaaaaaaaaaaaaaaaaaaaaaaaaggcc

SEQ ID NO: 1064 - DNA, 3991 bp, Mus musculus; identical to SEQ ID NO: 966

SEQ ID NO: 1065 - DNA, 3771 bp, Mus musculus
gcttgcggccgcagagcgagagcggtcccgggtctgtgcccaccagttgcagcgctgtcctggctcgtctgccccctgccgggtgccaccgatcgatccggtgctcggaggctacttggtacctgcggctctcaggcagttcaggcggggacacattcactgccacctgaggatcgtcctcccgcccgccccgcccgcccgggagactcctctcccatttcctgagacctcacgatgtcgattgtctgttctgcagaggacagcttcaggaatctcatcttattcttcaggcccaggctgaaaatgtacattcaggtggagccagtgctggaccacctcatctttctgtctgcagaaaccaaagagcagattcttaaaaagatcaacacctgtggtaacaccagcgcggcagaactgctgctgagcaccttggagcagggacaatggcctctgggatggacgcagatgttcgtggaggccctagagcacagtggcaatcccctagccgcgcgctatgtcaaacccacactcactgatctgccctctccttcctctgagactgcccatgacgagtgtctccacttgctgaccctcctccagcccactttggtggacaaacttctgattaacgatgtcttggacacttgcttcgagaagggactattgacagtcgaagacagaaatcggatttctgctgcaggaaacagcgggaatgagtcaggtgtaagagagctgctgagaaggattgtgcagaaggaaaactggttttctaccttcctggatgttctgcgccaaactggaaatgatgcactattccaagaactaacaggtggaggctgcccagaagacaacacagacttggctaactcgtctcacagagatgggcctgcagctaatgagtgtcttctgcctgctgtcgatgagtcaagtctggagacagaggcctggaacgtagacgacatattaccagaggcttcttgtacagattcgtctgtgaccacagaatcagacacaagtttggcagaaggaagtgtcagctgcttcgatgaaagtcttggacataacagcaacatgggcagggattcaggcaccatgggaagtgattcagatgaaagtgtcatccagacaaaaagagtatcccccgagccagaactgcagctcaggccttaccaaatggaagtggcccaaccagctctagatgggaagaatattattatctgcctccccacggggagtgggaaaaccagagtggctgtttacatcaccaaagatcacttagacaagaagaagcaggcatctgaatccgggaaggttatcgttcttgtcaataaggtaatgttagcagaacaacttttccgaaaagagttcaacccatatttgaagaaatggtatcgaattattggattaagtggcgatacccagctgaaaatatcatttccagaagttgtcaaatcttacgatgttattatcagcactgctcaaatccttgaaaactccctcttaaatctggagagtggagacgatgacggtgtgcagctgtcagacttctctctcattatcattgatgagtgccatcacaccaacaaggaggcagtctataacaacatcatgagacgatatttgaagcagaagctgagaaacaatgacctcaagaaacaaaacaaaccagccattcccctgccgcagatactaggactgacagcttcacctggtgttggagcagccaaaaagcagtctgaggctgaaaaacatattttaaatatatgtgccaatcttgatgcctttaccattaaaacagtgaaagagaatcttggtcaactcaaacaccaaataaaggaaccatgcaagaaatttgtgattgctgatgacaccagagaaaatccatttaaagagaaacttctagaaattatggcaagcattcagacttactgccaaaaaagtccaatgtcagattttggaacccaacattatgagcagtgggccattcaaatggagaaaaaagctgctaaagacggaaatcgcaaagatcgcgtctgtgcagaacatttgaggaagtacaacgaagccctacaaatcaacgacacgatccgaatgattgatgcatatagccacctggaggcattctacactgatgagaaagaaaagaagttcgcagtcctcaatgacagcgacaagagtgatgacgaggccagcagttgcaatgaccaacttaagggcgatgtaaagaaatctttgaaactggacgaaacggatgaatttctcatgaatttgttctttgataacaagaaaatgttgaaaaaactagctgaaaacccaaaatacgagaatgaaaaactcattaaattaagaaacacgatactggaacaattcacaaggtctgaggagtcctcccgaggaattatttttacaaaaacacgacagagcacctacgcactttcccagtggatcatggaaaatgcaaagtttgcggaagttggagtcaaagcgcatcacctgattggcgcggggcacagcagtgaagtcaagcccatgactcagactgaacaaaaagaagtcattagtaaatttcgcactggcgaaataaatctgcttatcgctacgacggtggcagaggaaggcctggatatcaaagagtgcaatattgttattcgttatggccttgtcacgaacgagatagccatggtccaggcccggggtcgagccagagctgatgaaagcacgtatgtcctggtcaccagcagtggctcaggagttaccgaacgggagattgttaatgatttccgagagaagatgatgtataaagctattaaccgtgttcaaaacatgaaaccagaggagtatgcacataagattttggaattgcaggtgcaaagtatcctggaaaagaaaatgaaagtcaaaagaagcattgcaaagcaatacaacgacaatccatcgttaataacacttctctgcaaaaattgtagcatgctggtctgctcgggagaaaacatccatgtcattgagaagatgcatcatgtcaatatgacaccagaattcaagggactctacattgtaagagaaaacaaagcactgcaaaagaaatttgctgattatcagaccaatggagagattatctgcaagtgtggccaggcttggggaacaatgatggtgcacaaaggtttagatttgccttgtcttaaaataaggaattttgtagtcaatttcaaaaataactcaccgaagaaacagtacaagaagtgggtggaattgcctatcagatttcctgatcttgactactcagaatactgcttgtatagtgatgaagattagcacttgattcatgattattttaaaatactgccaactcaacattgaatatgattttaattgttgttttcgctacactactgagctaactctagaatatgtagaggatgcttttgtttggctttcagtgatgtaacagaacaccaaaaatgtaaacatcttattggttggtaaatgtaattggtaatcaaaattgtcaatttgatgagttctaaaatcacctgggctcagggaatgcccatgaggtattgtcctaaattaattaaggaagatctgttctctgtgggtgatctcgggctacataaaattaagaaaactagctgagtccacatttgctctcataactttgcacttcattgtgcaatgcaatgtggcaagctacttcaagctcctgtcactgtgactaccacacagtcatggattaaaacctcaaactgcaagctacaataaatcatttcttcc

SEQ ID NO: 1066 - DNA, 5919 bp, Mus musculus
aaaagctcagcttgtcataatagttaacaccttctttgaccagcctccttttatttgacaatttttcttttctgtccctctctgttgccaccgggaaggtttttagggagtcccctcacatagcgagccgccccttggcgttcagaagattttctggggtagcccgtttgcaggatgccggtgcagctgactacagccctgcgtgtggtgggcaccagtctgtttgccctggtagtgctgggaggcatcctggcggcctatgtgacaggctaccagtttatccacacagaaaagcactacctgtcctttggcctctacggtgccatcctgggtctacatctgctcatccagagcctgtttgccttcctggagcaccgtcgaatgcgcagggcagggcgccccctcaagctgcactgctcccagaggtcgcgttcagtggcactctgcattgctgcctaccaagaggaccccgaatacctgcgcaagtgccttcgctcagctcagcgcattgcctttccaaacctcaaggtggtcatggtagtggatggcaatcgccaggaagatacctacatgttggacatcttccatgaggtgctgggtggcactgagcaagctggcttctttgtgtggcgtagcaatttccatgaggcgggtgaaggagagacagaggccagcctgcaggaaggcatggagcgtgtgcgagctgtggtgtgggccagcaccttctcatgcatcatgcagaagtgggggggcaagcgtgaggtcatgtacactgccttcaaggcccttggcaactcagtggactacatccaggtgtgtgactctgacactgtgctggacccagcctgcaccattgagatgcttcgagtcttggaagaagatccccaagtaggaggtgttggaggagatgtccaaatcctcaacaagtatgattcatggatctccttcctgagcagtgtgaggtactggatggctttcaacgtggagcgggcctgccagtcctactttggctgtgtgcaatgtattagtgggcctttgggcatgtaccgcaacagcctccttcagcagttcctggaggattggtaccatcagaagttcctaggcagcaagtgcagctttggggatgatcggcaccttaccaaccgagtcctgagtcttggctaccggactaagtatacagcacgctctaagtgcctcacagagacccccactaggtaccttcgatggctcaatcagcaaacccgctggagcaagtcttactttcgggaatggctctacaattctctgtggttccataagcaccacctctggatgacctatgaatcagtggtcacaggtttcttcccattcttcctcattgctacagtcatacaacttttctaccgtggccgcatctggaacattctcctcttcctgctaacagtgcagctggtgggcattatcaaggctacctatgcctgcttccttcgaggcaatgcagagatgatcttcatgtccctctactcccttctctatatgtccagcctcttgccagccaagatctttgctattgctaccatcaacaagtctggctggggcacttctggcaggaaaaccattgtcgtgaacttcattggcctaatccccgtgtccatctgggtggcagttcttctaggggggttagcctacacagcttattgccaggacctgttcagtgagaccgagctagccttcctagtctctggggccatcctgtatggctgctactgggtggccctcctcatgctgtatctggccattattgcccggaggtgtgggaagaagccagaacagtatagcctggcttttgcggaggtgtgatataacctccaagtaaagtgggaaatgtgcaatgggtaagggagggaatggaaaagatggggtgggagggaggagggtgtgttgtgttctagtttcatggctgaaaggaccgatctgaaacgcaaagaatagtgactgtggtatggcctgggtagctctgctcagcagaagcatggcattgggcagatgggcttgtatgtttctaggctgctcatctgcctgcccttgcacaggtagtgaactctttgaaatgattttacttcttcctgggaactattgagaacccagaagtgtgctaaaataagtgctaaattccatcctatgtcaacttctggtacagaaacaagcaatgacagctcatagaatatatcctcctagcccagctgaacatgacaaggagttcctgtcaagtgttactgtcccataccggctactgtcccatttccctaacctccgattagccatcaatgcgttaagactgtgcctgagataatgaggctgggaagctgacctttggtcaaaaaacagggtctaagaaatggtgctttatgtaattaatatattccactccacaccaaaacatcccagggatgagccaagtcaccagaagtaaggaatgagtctggtggggattttatctgttttgggtgcacagtacaaagcaaagtctgcaatgcaccaaacaaaagccgcccagttgttctgctgcacatttgtcatcccagcacttagaagcagaaagagatgagagggtcagggttaggctagactacatgagatcctgactgtctcatacaaaaatggtttgacggaggatcaaagattgcgttggtgctaaaaaccatggatgccttggagtgaatgtgttccaactgaaaactgcaaggtcttttacaaaattccccaagttgtcaagagaacttgctgggcagactggatggttttagccatctaccgggaagactcaaccccagtggattcagataagaagtctttagttattctagctcattcctacctgaatgcctctcacatatggctctcatcctgcttgctatttcaatctcttcagagccgcgcatgtcgcttagttgttgttttctggtggggagagcagcagttacctcttcattttcatgggtaaattcccatgtgaccatggtagagaatagacgcttacaaggctttcaaggctgttccctacatgcatggagctaacaacagcctctggccacactgttcatcgtccaggactggtcaggacttcggcagctggttagttagcatcggtaactttctcgaccatcattcccaaaggaaagctttctggagttgcccaaatgaaccttcagatccatgttggtcatctttgagagcatccattctcagtggcttctccaaggaattcgacggctagaatagtagatgcacctccatttgctgcttcagtccagaaaccaaagtaggagctggaaccggtccaacagtcttcagtcctcttacagccctcactggctgccgatttccttgtttctcttgaggaacgaggaacgaggagaagcttttacactcttttgaagtcaagaccagattgctttggcattgaagcgtgggctcgtgactaagcctttgactttgtgggctacttacaatttccctgaacatttgttctctgagggaccagctaaccctcagaagcaactgggttggagagcagtgtacataggtgcttcctacaaaagaatgaagtgcactccaaaccaccaatgggccatcccttgtatttcccttcctcgtatgaacaaaaggggttttccaggtgtagctaacagttgccacagcacacaaacctcaagttgcaggaaaactgctggctggtgtgaggcccaactcatggtggctgaggagcagcagccgtttgtgacaggcagttgctctggggccttctgttaagaagtgaactatttgagcactacagtggagacaatccagtcaacttcggggctcagactaagggcttgtttttcttcagcttttacttgaaggttacaggacaatggactctggatgaaaactggttgtctaccgtcagctctctgccttgcactgtggtcaactctcctcagattaaagatgcaggtacagtagtgagcttacaacatttgacctcgactggatttcctaatttattttataagcagcaaaactaaactgggtctacagctatatccctgtttcttgcaagggaagagcctttatacaattagactcattttggttttcctcattgacaatttcagcctcttttgtattatttctacaataatttgtatatattttttcctgcttttttattaaataaggaaggaactttatttaacattaagggtgggaaggaatcagaaaggaggataatattcatatcatgctcttggcacagccactgagcacaatgcacaggcctcgtgactcttaagcaaagtcacagtgtacaggtgtgcagctggagctcatcttcttcagctaagcttttatccgcggttctaccttcaccttgcctatgacctgcaaagtccaggaggtgccctgttcctccaggttgccagacaggtcataggaacacctcagaaagtgtagaactctaccaggacccttctcagaatgatccttctctgcttcacaatctctgccatctttctcaccattcctacaagctgtagtcagtgcaggtgccacagccaatggttcccctcaaccatccccccaacccccccagcctttacagcttcctctctgccttgtccttctacaactctgggcctcttgaaagcaaagccccccccccccccccgttgtcattctctttgctgatgtccatgttctcactccagcatcaactagtggggattcaagctgaggaccacggctctgccttttccaggaccacctctgcactctgggtagtggtgctgagctttgcccagcagtatgaaacctaagtccctctcttgaatctaatgctcaggaggtcgtatctcatcttctggcaccaccacctcaagagtgagatacttagaggtgagctgaagccctgctgaacttgtagttgcaggatgacccagctctcagccaattctcattcatgaggccactggtggtcaccctagttctatggaaggtgtctagccagttcctccagttcccatcttatttagcttttgctgtgccgaggccacctgcacaaggcagctgttagggcacagctcttggccagcttcttatgcaccgggttcacattcaccagcagtgcattctcctcttcttgcaatactccttttgtccttaaaggtgaaggtcagtctctcctttgtattaatgacatacttctcagtgaggccctacaggtctcaagcgccatgcatcagtgtgctgatgcctaacttctggtctatctcctccaacagcttagtcctcttctctgccaagaccttctgtagctcttcattatcccagctgtggtgttcccagggctggggtcattctcctctaacttctgagtcaggagtactgtccctgtggctcttcttgaaaggccatgggagctaaagttggatattacaaacccgtctttcttaatagtgactttcaagagtttcaacatcaatttggctgtaactgactgtttcaaagagcatctcctactttgtagctgcccagaatactgtgcagtgccattagagacctgagtttctgtcaccccgtagccccacctgttgtccactgtaggtgccattccggtgctgttttttgtactccaaatgttgctgtggcagcttgatgactccttaaaactaagttggcctcactgggctgccaccaagtcctgacacaaaatgcagacaattttgggtgacaaggcagccgctatcctgttgctggcaaccatgagcaagctgctcctggctccattgttttcgttgcccttggagactggctttttttgttgtttatcaggtcaagaatttttttttattgcacttatcaaaataaaaattcttacataactctggcgtgtccatt

SEQ ID NO: 1067 - DNA, 233 bp, Mus musculus
  misc_feature (96)..(96): "n" = a, t, g, or c.
  misc_feature (185)..(185): "n" = a, t, g, or c.
tttttttttttttttttgattgtagaaatagtttatttctgttcacagcatcatatatgcattataaaaggggaggggggaatggtaacagagaanagaagacagaattacagggaaaccaaaaccggaagccaagggttccaacaccgccacagagtatgtgaagaaataagctctcaatccanactggcctccctgtgtctatcagaaaccattcattccaaaccttgctc

SEQ ID NO: 1068 - DNA, 575 bp, Mus musculus
tagctgcacaggcctcagggctatgagcccagcccaatacctctggccatcagcatcacttcagaagagtctggactaagcgcagagccttcttgtcgccccgaggcaaacagtccaggaggaaagctggtgttgaaaaagagagattgtgtgtctttacgtaagagccaaaccctatcaaaagaaaagcatgttcacagtagtccacccaagggacccaagggatttccaaacccttcacagcctggccctccccacccacagtccctgtgaggtagtctggttcattctccattcggttcccgccgagatggcagaggattgggcacagggaccatttagatgcttgccccacggccctgagggtgtggtatgacaggaagcagattcgacagtggggaacaagtggggcctcgggacgcagccagacaaagtgctttgctgtagggagctgggctatttctgtcttgccctagttagggcgccccccccctcccagtggtgtttcataatcgcaggtcctttgacatttttgtgacgcgacatccttggaacacagccgaaaataaccttgg

SEQ ID NO: 1069 - DNA, 422 bp, Mus musculus
  misc_feature (287)..(287): "n" = a, t, g, or c.
ttgttgttttttaaaaatggtttctgtaaaagaatttttggtaattatctaattttggatacagtagctatatacaaaacatcattggaaaccacatcactgcacaagagaaaatagaagcatcaggtctcacgattttagcaaacagtgcaaaccttggaagcctgagattcggaccccagctcacaactacagcactgtctgccttgccctaagacgagtgcagggaattgccttcttcggcttgggcgagagagacacttctggcaatggtgccgagagcttgntacagctggctagcacatcaaatgaagctggcccatgaggcttgttttagaagctattacaatggtaagtgctgagggtctcatccccacgagtgaaaatataggtgtgttacaaaatagaagcttttattgaga

SEQ ID NO: 1070 - DNA, 403 bp, Mus musculus
cggccgcggacaccgaggcaggcgcgagccatggagggcaaccgcgacgaggcggagaaatgcgtgcagatcgctcgcgaggccctgagcgccggcaaccgcgacaaggcccagcgcttcctccagaaggccgagaagctgtacccgctgccggccgcgcgcgcgttattggaaataattatgaaaaacggcagcaccgctggaagtagcacgcattgccgaaaacctcctgggagcagcgaccagagcaagcccagctgtggaaaggacggcacttctggtgctggggaaggcgggaaagtctataccaaagaccaagtagagggcgtgctcagcataaacaaatgtaaaaattactacgaagtcctcggagttacaaaagatgctggtgatgaagatttga

SEQ ID NO: 1071 - DNA, 457 bp, Mus musculus
cgcaaacacctaatgggaaatgtgactgtgtccattccatcggcccgaacctagtgtctcatggagctaaacactaaaataatttaaataaaaggcaagcgctcgcatgtgtacaaaatcatcctagaaatatttacatggcaaaggaacaatggagaatcacaaagctggcaactgctaccggtgtgataatcctctccagactttgtaaggaatcatataagattttaaagttaaagtaattgcagaagcatactaaaatatttagttttcagttcttactattgagatgagccagtaggtcattaacagtccaagatttcaggaatcaactactcagcttagtctttaatcaaatcttcttcagcttcatggcgacatgaaatttacagagaagacagagtacacagaaaggagcaggtgggacccagcttatccccccttgtagagactggtc

SEQ ID NO: 1072 - DNA, 675 bp, Mus musculus
  misc_feature (6)..(6): "n" = a, t, g, or c.
agaacnctattacaaaaagtagaaaagagtgtggaagaggattacgtgactaatattcgaaataactgctggaaagaaagccagcagaaaacagatatgcagtatgcagccaaagtgtcccgtgatgagcagctgcggaggaaggcggatgccctgagcatggagaactgcaaggagctagagcggctgaccagtctctacaaggggggataagctgggtcccacctgctcctttctgtgtactctgtcttctctgtaaatttcatgtcgccatgaagctgaagaagatttgattaaagactaagctgagtagttgattcctgaaatcttggactgttaatgacctactggctcatttcaatagtaagaactgaaaactaaatattttagtatgcttctgcaattactttaactttaaaatcttatatgattccttacaaagtctggagaggattatcacaccggtagcagttgccagctttgtgattctccattgttcctttgccatgtaaatatttttaggatgattttgtacacatgcgagcgcttgccttttatttaaattattttagtgtttagctccatgagacactaggttcgggccgatggaatggacacagtcacatttcccattaggtgtttgcgtgtgtggagtttaaacaatgaacatttttc

SEQ ID NO: 1073 - DNA, 388 bp, Mus musculus
tttttttttttcggataaattttcttttatttccatactcttttgtgacatgtgtggcacaagtattcaatctaacagggatgttaaaacccacactcgaagggtgtccagtgtgcttaggaaatgtgggtttgcgcaatcacaggccaagcctgggggtcctcggggaagctactcctccaggtcacctgccaggtggatgcacttccttgggcaatgggtgaccctcccaggacaaggggaaccagcagggactcgatggcaccacacagcagccacctgttctgacaatgtgacacagaccaactaatgccagagcccaggagaagccacagcagagctgcctgggttggtgtcagagcaacaggcagaattgactgtgccgccc

SEQ ID NO: 1074 - DNA, 692 bp, Mus musculus
ggacccggagatcggtggagagcggagagcttggtctgcactgcctacgccgttggcagcgaggctgtctccggaaggcggaccggcgctagcccagtacccgctctcggctgcccgctgctctcctctgcgcccctgccaatctcattcaggactcagtgactggtttttttttgtttgtttgtttgttttgttttgttttgtttttcttaatcacaagggcgtgggtcagcctcccctaggacttcatgtctgtatatttccccattcactgctctgactatctgagatcggctgagatgaccgaggtgatgatgaacgctccatccatggaagagattggtctcagcccccgcaaggatggcctttcctatcagatctttccggacccatcagactttgaccgttgctgcaagctgaaggaccgcctgccctccatagtggtggaacccactgaaggggaggtggaaagcggggagctccggtggcctcctgaggaattcctggtccaggaggatgagcaagacaactgtgaagagacaacaaatgaaaagaaggaccagtagagtccacgcaggctcgcctgggtcatgccagccagcacacctgaactgtttttcccatggtgatggaagaagagaatgagccacagtcattgtgaaaatgtcaaacgaggcttccgttttgcaccc

SEQ ID NO: 1075 - DNA, 439 bp, Mus musculus
aagccgccggtgaatgaaactaacaagagagactatgtgtctaagtctgttgattacatttttaacatctctataaagacgatttatgaagaatttcatagaggattttacaaagtgtgtaactgggatataattaggcaattccagcccgaagaactaatgacagcaataattggaaatgctacttgtgactggaaacaatttgaaaataattcaaagtataaagatggatatgacaaatcacacccaactattctgctgttttggaaggctttccatgacttaactttggatgaaaagaaaaaattcctcttgtttcttacaggatgtgataggctgcatgtgaaaggcctacagaatgaaggaatagtattccggtgttctgaaaccttcagtgaagaagatacccaagatcattgacatgtcacaggatgctaga

SEQ ID NO: 1076 - DNA, 330 bp, Mus musculus
tattcctatttccccccttcccacatgctcattttctcatcctaagaaatgcataccttcgcttttaaatttcctaaagctactcataatatagctccacattctttagaattcctgaaaacgtcttcggcatctttggaagtttcttcattgtacatattgtttcagatgttaaagaaagccttcatttttcaaatacactatggagttgcaacggagcagtatattactaatattaaagttcttttagaagtgataaaagaagtgcataaggtaaaatttctttttaaaaattgtatataccaatttattaaataataaattattatt

SEQ ID NO: 1077 - DNA, 475 bp, Mus musculus
tatgatgctatagagtaaattaatgaagcaatgtaactgctatggaaaatgaccaatacatcttgtatactagttctacttaatgttagaacttaatttgaattacacagctttgaaataatttcataaatataatttgtcataagaatgacatatatgctgctgtgacaatcactcatcataaaagttccatttctgtaaagatgttgtatctttatagacttatcagactttatatgtgagatgtttactggactccaaagaaaccaaataagctaattaaaaatagatcatttaaagaaaataaaatgattgtcatcaattgctacaacaaaagcaaatgaatcgttagaagagggaatacgcttcagctaattctcggattccaacattgctccagtaccagacaaagatgtcacagagagaggaaaccatagatatcttacgtgaacagacaccaaaatccttccctaca

SEQ ID NO: 1078 - DNA, 1659 bp, Mus musculus
atggaggcggcggccgctgctccacgtcgtccgcagctcctcatcgtgttggtggcggcggcgacgctgctcccgggggcgaaggcattacagtgtttctgccacctctgtacaaaggataattttacctgtgagacagatggtctttgctttgtctcagtcactgagaccacagacaaagttatacacaatagtatgtgtatagctgaaattgacctaattcctcgagacaggccatttgtatgtgcaccatcttcaaaaacaggggcagttactacaacatattgctgcaatcaggaccactgcaataaaatagaactcccaactacaggacctttttcagaaaagcagtcagctggccttggtcctgtggagctggcagctgtcattgctggtccagtctgcttcgtctgcattgcacttatgctgatggtctatatctgccataaccgcactgtcattcaccaccgtgtgccaaatgaagaggatccatcactagatcgccctttcatttcagagggcaccaccttaaaagatttaatttatgatatgacaacatcagggtctggatcaggtttaccactgcttgttcaaagaacaattgccaggaccattgtgttacaagaaagcattggcaaaggtcggtttggagaagtttggcgaggcaaatggcggggagaagaagttgctgtgaagatattctcttctagagaagagcgttcatggttccgagaggcagagatttatcagactgtaatgttacgccatgaaaatatcctgggatttatagcagcagacaacaaagacaatgggacatggacgcagctgtggttggtgtcagattatcatgagcatggatcccttttcgattacttgaatagatacactgttactgtggaaggaatgatcaagcttgctctgtccacagcaagtggtcttgcccatcttcacatggagattgttggtacccaaggaaaaccagctattgcccatagagatttgaaatcaaagaatatcttggtgaagaaaaatggaacctgttgtattgcagacttgggacttgctgtgagacatgattctgccacagatacaattgatattgctccaaaccacagagtaggcactaaaaggtacatggcccctgaagttctagatgattccataaatatgaaacattttgaatccttcaaacgcgctgacatctatgcaatgggcttagtgttctgggaaattgctcgacgctgttctattggtggaatccatgaagactatcagttgccttattatgatcttgtaccttctgatccatcggttgaagaaatgagaaaagtagtttgcgaacagaagttaaggccaaatattccaaacagatggcagagctgtgaggccttgagagtgatggctaaaattatgagagaatgctggtatgccaatggagcagcaaggctgacagctttgcgaattaaaaaaacattgtcacaactcagccaacaggaaggcatcaaaatgtaactgaaacaccgtgggaactctgctctcttcatatctgctcctgggtgtttaggaggctggttgttctacctcactgagagaacagagggctctgcttcctcttgcagcagtggaatatggtcaactgaaagcttcccagggtttctc

SEQ ID NO: 1079 - DNA, 465 bp, Mus musculus
cggccgccggtatttttttccatgtatctttacaaatggcctttgtttttagagctaatgtttgttgaatgaaatgacttcaggcaagtctttttttataatcatttttcaagtgccatttgtgtgtgcgtgtgtgttctgtgtttgtaagtatgaacaaattatttcctaaaacatgccaaatggatagaagtagaaaacaatgtttagaaatgtgtccataaaactgtcaagccaactgggcacaacttaaaagaaacttacagtgtactcttatatctttatacatgtttccaaaaataagatttttgcaactggatgatgcaagggtttacttgaacaatgaaggaccgagatcatgaccgtaggaggtattatttcttgtctgtgatttttgcagaggttccccttcaatgttagtgatcttaaacattaaaatgcaattgttaagatttggttgccctc

SEQ ID NO: 1080 - DNA, 403 bp, Mus musculus
ctgcttgcaggatcccctcagtgctgggtgaggagctgcctgcctgcggcagcattactgggaaaccaccgtcgcagaagtccagcctatcgactcggcatctgcaccagctcagctgtgagggctggtgccctgggacaaggggagacctcatggtacatgcactgctctgagccacagagatacacatttttctacagtggcattgtgagtgaggtgcacgcaaccgagcgtccagccagagtgggcattctgctggactataccaaccagagacttctgtttataaacgccgagagtggacagctgctcttcatcgtgaggcacaggttcaacgagggcgtgcatcccgcctttgccttggagaagcctgggagatgtactctgcacctgggcttagagc

SEQ ID NO: 1081 - DNA, 468 bp, Mus musculus
cggccatgggaaaagaaagcatagttgcctaccattctttgaccatttgcagtccatggagaagaggctccagttctctttttttgctctgactttctctccaaagcattccagccagtcctatccatgatggggcacaattgtttggatctacttaggggggccactaatttcccttgtgtagacttgaactaactctccctgaggtaaaggacatcaattattggcatatatttcagaggtgtgtgcgcaatgtttgtagaataaatatgctgaaaccttttggccaattcaaaagcagaaaaatgtatttggcaaagtccattctcacactcacacactttatagtaacaaacatgctagggagctttgaggggaccatgctggtcactttgttgtatatgactgctctgtgttttgctgaaagcaattagaaggtaatcagagcactgacaaccacatgttcat

SEQ ID NO: 1082 - DNA, 536 bp, Mus musculus
tttttttttttttttttaggtgacaagcaattttattttgcaaaacaatcactatacagcaacaaatacatttgcaaattgattgaaaaacatgaactaactacaaccagccattgaagaaatacctttctatggtaacaggctctagaattatcagaagaaagaaccccccacagatggtgtgttgaaaccttgggatcccagcatacagagtatactttttgttgaattttcccccctttttgctaaagttgaagtggactttcatgattggcattttttttaggggttttgaaaaaaaaaaaaaaccttttcctacagagggacttggcctcaatctacatgtccaggctaaaacttctaggtgtaaaaacacaaacataagtattaattttagcacatcaatcttggagaaatgcctgaaatttgccttttccaaatgattaatctacttttactttgctacttctaccacaatcatttccttttttcccccatgtggcatgaaatatgagaggaaagctataaatgaggct

SEQ ID NO: 1083 - DNA, 443 bp, Mus musculus
tttttttttttttttttaagtaattatgtaactttactaggaagtgaagacaatgacatatttactttgaatgaaagtgtctgtaacattggttggctagtcattcttcaatgtaacatcccagtgttattcagccttgccctgagttaaccaaatcactggagaacagaagcaaatggaaacaagcctctccctttcattccatctcttcatccatcttcgtaaggtcatccttagtgccagtgctggggaggccacctcccaagccacagtctctgccagtccacttagacacagcagccaaggtctcaaggcttcagtgtcgataggacagcaatgtggatccctctccctgcttgaagcccactggttgatgcctatggtgggaacataaatcctcccccatcacccaagctattacacagcactagcttcagggccta

SEQ ID NO: 1084 - DNA, 2903 bp, Mus musculus
ggaacttcccgggttactacagggtctatgtcacagtgcctgtgagagaggacagagcactctgcagccagcctcagaggcaaagctgacgggcattgaaaggctgattcttctctaaaggatttctcttcagagacaaaaagaaaccaccctggacatggcctcagagatccacatgtcggaacccatgtgcctcattgagaacactgaggctcaactagtgatcaaccaggaggctctgaggatcctgtctgccattacacagcctgtggtggtggtggcgatcgtgggcctctaccgcacaggcaaatcctacctgatgaacaagctagctgggaagaggacaggcttctccctgggctccactgtgcagtctcacaccaagggcatctggatgtggtgtgtgcctcaccccaagaaggcagggcaaaccctggttctgcttgacactgagggccttgaagatgttgagaagggtgacaaccagaatgactgctggatctttgctttggcagtcctcctcagcagcaccttcatctacaacagcataggaaccatcaaccagcaggccatggaccagctgcactatgtgacagaactgactgatctcatcaaatcaaagtcatcacctgatcagagtgatgtagacaactcagctaactttgtgggcttttttcctatctttgtgtggactctgagggatttctccctggatctggaatttgatggagaatccatcactcctgatgagtacctggagacttcactggctctgagaaaaggaactgatgagaacactaaaaaatttaatatgcctcgcctgtgtatcaggaagttcttcccaaagaggaagtgcttcatctttgacaggcctggagacaggaagcaactttccaaactagagtggatacaggaggaccagctgaataaagaatttgtagaacaagttgcagaattcacctcatacatcttcagctattctggtgtcaagactctatctggaggcatcacagtcaatgggccacgtctgaaaagcctggtgcagacctatgtcagtgccatctgcagtggagaactaccctgtatggagaacgcagtcctgactttggcccagatagagaactcagcagcagtgcaaaaggccatcacctactacgaagaacagatgaatcagaagatccacatgcccacagaaaccctccaggagctcctggatctgcacaggacctgtgagagggaggccattgaggtcttcatgaagaattctttcaaggatgtagaccagaagttccaggaagaattaggggcccagctggaagccaaacgagatgcctttgttaagaagaacatggacatgtcatctgctcattgctcagacttactggagggcctctttgctcatctggaagaagaagtgaagcaggggacattttataaaccaggaggctactacctttttcttcaaaggaaacaagagctggagaaaaagtatatccagactcctggaaagggactccaggctgaagtgatgctgagaaaatactttgaatccaaggaggatttggctgatacacttctaaagatggaccagtcactcacagaaaaggaaaagcagattgaaatggaacgtataaaagcagaagccgcagaagcagcaaatagagcattggcagaaatgcaaaagaagcatgagatgctgatggaacagaaggaacagagttatcaagagcacatgaaacagctgactgagaagatggagcaggaacggaaagagttaatggcagagcaacaaagaatcatatcccttaaacttcaggaacaggaaagacttctcaagcaaggattccagaatgagagcttgcaactacgtcaagagatagagaaaatcaagaacatgcctccacctcgatcatgcaccatactttaaaatctgaacagactaaagctctctaccctgtttccactcatcaaggaaaaaacttcggggacagctttggattgtgacacagcatggcattgaatgagacttgaagacaatgacactttactaggaagaagggagaaataaagttcacaaagtggagtttatatgtgaaaaaaatgtttggcttatgaggtgactcagttcatgtttgtgttagaagtgaaaattcatgtgatttttaatcgggtcttatatttgatactgcaaacatggactctgtagacatactaaattgtattgttgggatttgtttttacaacacagtgatagggcagctgtctttgggtagacattttgtatcacatacatcccctactggatattcttagttgtgtgctcataagtaattcaaagatgtagcttgctctaagctgggattggcatgttataaacatgataaaaatctgaacatatccatggaacacagctcctagggcctcatgctatctgcagacattggttcccagggtagacaatgggcagtgcccaatgtgggaaggctctgtggttgctggatgagcagagtatttcattggagaggagaagaaaattcccctccaggcagaatcgataggcgagtgggcgttgcacctcccccattgagagaacttcttgttttctttcatgctccagcctactgtgtttcctttctaatctctctttttatttttcaaaaacactttctccttctaagagttttagaatgacttctacacagaatggagaactcaaaataaatttcgttctattcctctgaggctcataatcacagtgccaactcttgtgaaaccaaccttcatttttatctttcttttgctgctatgacatgatttgcatatctctgaagataaatgccttttacaatgtggcagaagcactgtttaagtgaaaactgttaataaaaactcgtgccgaattc

SEQ ID NO: 1085 - DNA, 3703 bp, Mus musculus; identical to SEQ ID NO: 998

SEQ ID NO: 1086 - DNA, 414 bp, Mus musculus
ctggatgccgtatactatctccacagaatgggcattgtccacagggacctcaagccggagaatctcttatactacagtcaagacgaggagtccaaaataatgatcagtgactttggcttgtcgaaaatggagggcaaaggagatgtgatgtccacggcctgcgggaccccaggctatgttgctccggaagttctcgcccagaaaccgtacagcaaagctgtggactgctggtccatcggggtgatcgcctatatcttgctctgtggttaccctcctttttatgatgaaaatgactcgaagctgtttgaacagatcctcaaggcagaatatgagtttgattccccctactgggatgacattctcgactctgccagagactttattcggaatctgatggagaaagcccaaataaag

SEQ ID NO: 1087 - DNA, 1559 bp, Mus musculus
cctttctggtgctggaactgaacctgggtcttgtagaagagcagcaagtgctcttacctaccaagctctctctccagccccatgtggtggtgttgtgttttgtttgtagtagaatgccctcgaggactgctcccacggccatgcagagtgctggtgctgctgaacccccagggtggcaagggcaaggctctgcagctcttccagagccgtgtgcagcccttcctggaggaggcagagataacctttaaactgatactcaccgaacggaagaaccatgccagggagctggtgtgtgcagaggagttgggtcactgggacgccctggcagtcatgtccggtgatggtctgatgcatgaagtggtgaatgggctaatggaacggccagactgggagactgccatccagaaacccctgtgtagcctccctggaggctccggcaatgcgctggcagcttctgtgaaccactatgctgggtacgagcaggtgactaatgaagacctgctcatcaactgcacactgctgttgtgccgccggcgcctgtcacccatgaacctgctgtccctgcacactgcttctgggctgcggctctattctgtgctcagtctgtcctggggctttgttgctgacgtggacctcgagagtgagaagtacaggcgcttgggggagattcgtttcacagtgggcaccttctttcgcctagcaagcctgcgcatctaccaaggccaactggcctaccttcctgtaggaactgtggcctctaagagacccgcctctacactggtgcagaagggccccgtcgacacacaccttgttcctctggaggagccagtgccttctcattggactgtggtaccagaacaggacttcgtcctggtgctggtgctgctacacacccacctgagctccgagctgtttgcagcacccatgggccgctgtgaagctggtgttatgcatctgttctacgtacgtgcgggggtgtcaagggctgcgctgctgcgcctcttcctggccatgcagaagggcaagcatatggaacttgactgtccatacctggttcatgtgcccgtggttgctttccgcctggagcccaggagccagaggggcgtgttttctgtggatggagagctgatggtatgtgaagctgtgcagggccaagtgcacccaaactacctttggatggtctgtggcagcagagatgccccatccggccgggactcccggcgggggccacctccagaagaaccataactctgtgcctttgtctactctgtctaggctgagatgggaccctcccccgcacccacttcctggtatgggaggttatttctaaagttcctatggaagtggtggggacccctgcagagaaagctagaaggtggggctatgacttggaaagaaaggctctaccttccagttagagtaacatccccagtagagccctgctggctggaccagttgcatatagaagacactccccattgctcttagggaccttccctgggaaccaaattcaaataaagagacttttccaaaaaaaaaaaaaaaaaaaaaaaaaaaaa

SEQ ID NO: 1088 - DNA, 1811 bp, Mus musculus
gagaagtttctaggctcgcgagtccccgagctttattaaactcctggctgtgctcaagacctcagcaggctttggctgggagccggggcagcctgggaggaaggcagccggtggcttactgatagccaagcgagagagagaggccctctgggattctgctgggcccgcttagggagggggtcacctttgtaagccaggaccccagctcaattctgggcagccagcggatggttgggctcgtggctgaaggaagatcagcattttctgaagtggagaactaaattctgaaagccatctcaagccacatcaccttgctgtgtgacctttgggtaggtggctctgtctctctgagcctctgtttccccctctaagttcgaccaacatcatggctgacgggcaattgcctttcccgtgctcctacccaagccgcctgcgccgagacccctttcgggactcaccgctctcctcccgccttctggacgatggctttggcatggacccttttccagacgacttgacagccccttggccagagtgggctttgcctcggctctcctctgcctggcctggaaccctaaggtctggcatggtaccccgagggcctccagccacagctaggtttggagtgcccgctgagggcaggagtcccccacccttccctggggagccttggaaagtgtgtgtcaacgtgcacagcttcaagccggaagagctgatggtaaagaccaaggatggatacgtggaagtttcaggcaaacatgaagagaagcagcaggaaggtgggattgtctccaagaacttcaccaagaaaatacagctccctgcagaagtggatccagccactgtatttgcctcgctttctccagagggcctgctcatcatcgaggctccccaggtccctccgtactcaccctttggagagagcagcttcaacaacgagcttcctcaagacaaccaggaagtcacctgttcctaagacgtcagccttggtccttcttcgctcccatccccagccccagggactctctgatttgagggtacactactttagcagcactcagatttaaggcaactcagatgttgggggatgggagggagaaccgaacgaccgtccctggatgatgtagtaatagatttctccacagggtgacgcaatgggtcagccttgcttggttgcgttaggtcaaaggattgggaggtttttcttcatcttatctgggtgaagacgtctcgcagtctacagttgcaaaacaagcaaatggggactgaagatttcatgttaaatttttaccttgcagttaatgcaagagttgcttttctctggggaccttcccatcacccagatccctgctctggaccctccttctacgtggcttggttgatgggactcattggctcacctcagtgtgtttctaaactctttgtctagaagaggttatgggcaggtcttatatccccatatgggatttatccttcaccacacaacacagtgcctttttttgcagcatgaccccatggctctcaaaccatcaccaccaagaactctgggagcccctcagttaattctctggctaaggtccccctttattgtgtcccctgtgtccaagtcacatttttacagagagctgtcttggagcagctccgcaaggaaccaagcaaaggccagacagcctgcacgcaggctagtggcattgtgtgtgtgtttgaggggtggggaggatgtgtgtgtctttgttgtgtgaattgtgctgttgtttagagggaaaataacggtgaataataatgatgataataaaggagctgatgttcct

SEQ ID NO: 1089 - DNA, 952 bp, Mus musculus
agccaggagcctcgccccgcagctgcacagagagcaagggtataggcactaacttgtttgcagagaccccatcaccttcgggagctcaggtgcgcaccttgcaaactccactttctgcatctgccactgagcccgcgggagcctcggaaagagccatggccaacgcggggctgcagctgctgggtttcatcctggcttctctgggatggatcggctccatcgtcagcactgccctgccccagtggaagatttactcctatgctggggacaacatcgtgaccgctcaggccatctacgagggactgtggatgtcctgcgtttcgcaaagcaccgggcagatacagtgcaaagtcttcgactccttgctgaatctgaacagtactttgcaggcaacccgagccttgatggtaattggcatcctgctggggctgatcgcaatctttgtgtccaccattggcatgaagtgcatgaggtgcctggaagatgatgaggtgcagaagatgtggatggctgtcattgggggcataatatttttaatttcaggtctggcgacattagtggccacagcatggtatggaaacagaattgttcaagaattctatgaccccttgacccccatcaatgccaggtatgaatttggccaggccctctttactggctgggccgctgcctccctctgccttctgggaggtgtcctactttcctgctcctgtccccggaaaacaacctcttacccaacaccacggccttatcccaagccaacaccttctagtgggaaagactatgtgtgacagaggcaaaggaagagatcttcctggagcaaatacaaaatggacattgaacctaggattgacattaacgccttagactgttgatgatggttatcggaactgtggtagaacagaaggaagcatatttttatacatccccatggctatgcaggccttggctg

SEQ ID NO: 1090 - DNA, 2443 bp, Mus musculus
atggcccgggccgcagtcctcccgccgtccagattgtcaccgacgctgccgttgttgccgctgctactgctcctgcttcaggaaacaggagcccaagatgtgcgggtacgagtgcttcccgaggtccggggccgcttgggaggcaccgtggagttaccgtgccacctgctcccacccacgacggagcgcgtctctcaggtgacctggcagcgcctggatggcacagttgtggctgctttccacccatccttcggagtggatttccccaactctcagttcagcaaggaccgtctgtcctttgtcagagcgagaccagaaacaaacgcagacctgcgggatgccacactggccttccggggactgagggtagaggacgagggcaattacacctgcgagtttgccacgtttcccaacggtacccgcaggggggtgacctggctcagagtcatagcccagcctgagaaccacgctgaagcccaggaggtcacaattggcccccagtcggtggctgtagcccgctgtgtctccactgggggccgcccccctgcccgaatcacctggatctcatctctgggtggagaggccaaagatactcaggagccagggatacaggctggcaccgtcactatcatcagccgatactccttggtgcccgtgggccgagcggatggcgtcaaggtcacgtgtagagtggaacacgagagcttcgaagagccgatcctgctgccagtgaccctctctgtgcgctaccctccagaagtatccatctccggctatgatgacaactggtaccttggccgcagtgaggccatactgacctgtgatgtacgaagcaacccagagcccacagactatgactggagcacgacctcgggcgtcttcccagcctctgcagtggcccagggctctcagctgcttgtccactctgtggatcgaatggtcaacactaccttcatctgtacagccaccaacgctgtggggacaggccgtgctgagcaggtcatcctggtgcgagagtcacccagcacagcaggagcaggggccactggtggcatcattggaggtattatcgctgccatcatcgccaccgcagtggctggcacaggcatcctcatctgccgacaacagcggaaggagcagaggcttcaagctgcggatgaggaagaagaactggaaggacctccctcctataaaccacccaccccgaaggccaagctggaggaaccagagatgccctctcaactcttcaccttgggggcctcagagcacagcccagtgaagacgccatactttgatgctggtgtctcttgtgctgatcaggagatgcctcggtatcacgagctgcccactctggaagagcggtcagggcccctgctgttgggggctacaggcctgggaccttctcttctggtgcctccaggacccaatgttgtggagggggtttccctgagtctcgaagatgaggaggaagatgatgaggaggaagacttcctggataaaatcaaccctatttatgatgccctgtcctaccccagcccctctgactcctaccagagcaaagacttttttgtgtcacgggccatgtatgtgtgagggaggcacaggggctctgacgtctcacctttcacccttgacccatgagctttccaccagtaatctaggacactctgacttccaggcagaccagggaccaactatcacccattgcaatccacctgtgacttcttagtgactccaccatgacgtccaatctatgatgtctgaggcaggcaaacctgcacaactggaaacctggagatttttatctcccttggcagggagctcaccatatccttctgcaccacctgtgaccccccccccccccccaaggactcctaagactacgaccctttgaccatgccactcagtatctcaagaacccttaaagtcccaaaggaatcggaccttgcacttgtcctcaggcaatagaatccaacagatatgcaagaacgggatcaggggccatccctgttgctcagacctgagccctccaggcagcagaagctcacctgatccctccccaccctgctccccaaaggtgaaaaggagaggattccccaatgtaaggtaggacctccccatctccacctactcctgcaggcaggaatctcaggtttctcacaccctctcctcagcacccaggttcctgtctccagagcatgaattccaggtccaatgctagaggggagaacctaatgcaagtgtgcccttgccaccccaagtttgggagactctgctcttatcctgaggactactgaattcttttaacccctacccagtgagatgagaactacatatccctctttaggggatggtgtgtgtatgtgtgtgtgatggagaatctgggcatctgggttgggaattttattttgtaagcatttcctacataatatgagtttctacc

SEQ ID NO: 1091 - DNA, 317 bp, Mus musculus
tttctcacctctagggagaccaggaagggaagaaaggctgtgaaaactccaaagctttaatatatttggtttatgtaactggagcactgatctagcttgctgcacacactctgcctgcccccaggataaaggcctgccatccctcgtttccagacagctgtggaagtgacacatggttacttctgtcactggacaaccagaagactcgttatgtccccttggctggaagctggcttctcctgtgccgcctataagccagctctgctcgatgttcctgggttgaacctacttggtgctgttccgactggcctgggctg

SEQ ID NO: 1092 - DNA, 321 bp, Mus musculus
cttgcctcctttataccattcggccttacccctgaacgcccgtggacgaccgctgacaactgaagccccctttaatacattggcaagaagaagatttggacaccggaagtgcctatgtggccctcgacccagagagtttaacctgggctgttgttccacacttggttgctgttaccctctggtactggttttttttcccttgggccctgttaccaaggtggatgtgagagacattatttatgaaacttgccaggttccttaaatgacatgtacaatataagtgcaaagacagggagcgtcaataaagatgttggaatcacg

SEQ ID NO: 1093 - DNA, 500 bp, Mus musculus
agcccggcaccctgtccattgccagccatgcgtcactaccaaatatatggaccgcatggcaagccatcacccctttggtagaggaactgaatgtcctacttcaggaatggcctggactgcactacactgtgcacatcctctgttctaagtgccttaagagagggtcgccaaatccacacgctttcccaggggagttgctgagccagcccaggccagaaggggtggcagagatcatctgccccaagaatggcagcgagcgagtgaatgtggctttggtttacccacctacaccgactgtgatcagcccttgttccaagaagaacgttggtgagaagcacagaaaccagtgacatccgcgcctgtggaattttcatggagttaatacagggcatgggaccgactgggacatctcccgcccctggaggcctcctgccgtactcccaagcgccttccggggcccagagtgaaaccgcgcatgcacactggggtgcttgcagagg

SEQ ID NO: 1094 - DNA, 3012 bp, Mus musculus
cggacgcgtgggatctctcagagccatcacccgaaacaggccaccatctcctcgatctacagactacacttggaaacacaaacaaatataaatatctgaagacccacgtgggacctgaagaatggcctattacatggatacatgggcggcagctcccgccgaaagaccagccaacaattctcttgaagaacattatagatggcaaattcccattaaacacaatgtcttcgaaattttaaagagcaatgagagtcagctatgtgaagtcctccaaaataagtttggatgcatctctaccctgagctgtccaactctagcagggagcagctctcctgctcagagagtcttcagaaggaccctgatccctgggatagagttatctgtctggaaggatgaccttaccagacacgttgttgatgctgtggtgaacgcagccaatgaaaaccttttgcatggaagtggcctggccggaagcttggtgaaaactggtggctttgaaatccaagaagagagcaaaagaatcattgccaacgttggtaaaatctcagttggtggaatcgctatcaccggtgcggggagacttccttgccatttgattatccatgcggttggacctcggtggacagttacgaacagccagacagctatcgaattactgaaatttgccattaggaacattctagattatgtcaccaaatatgatctacgcattaagacagtagcaattccagccctgagctctggaattttccagttccctctggatttgtgtacaagcataattttagaaactatccggctttatttccaagacaagcaaatgttcggtaatttgagagagattcatctggtgagcaatgaggaccccactgttgcgtcctttaaatccgcctcagaaagcatcctagggagggacctgagctcttgggggggtccagaaactgaccctgcttccaccatgactcttcgcatcggccggggcctgactctccagattgtccaaggctgtattgaaatgcaaacaacagatgtaattgttaattctggatacatgcaggattttaaatcaggacgagtggcacagtcgattcttagacaagcaggggttgaaatggaaaaggaacttgacaaggttaacctgtccacagattatcaagaggtgtgggtcacaaaaggatttaaattgtcctgtcagtatgtcttccatgtggcatggcattcccaaatcaacaaataccagatattgaaagatgcaatgaagtcctgtctagaaaaatgccttaaaccagatataaattccatttcctttcctgctctcgggacaggattgatggatttgaagaagagtacagcagctcagataatgtttgaggaagtttttgcatttgctaaagagcacaaggaaaaaacgctaactgtaaagattgtgatctttccagtagatgtggagacgtacaagattttttatgctgaaatgacaaaaaggtccaacgagctgaatctcagcggtaatagtggtgctttagccctgcagtggtccagtggggagcaaagaagaggcggccttgaagctggatctcctgccatcaatctcatgggtgtaaaagtgggagagatgtgtgaggcccaggaatggattgaaaggttgctggtctccctggaccaccacatcattgagaataatcatattctctatcttgggaaaaaagagcacgacgtgctgtctgagctccagaccagcacaagagtctccatttcagagactgtcagtccaagaacggccactttggagattaaaggtccccaggctgacctcattgacgcagttatgaggattgaatgtatgctgtgtgacgttcaggaagaagtggcaggaaaaagggagaaaaatctttggagcttgtcaggacaggggaccaaccagcaagaaaaactggataaaatggaagaatcgtacacatttcaacgatacccagcatcattaactcaggaacttcaggaccgaaagaaacagtttgaaaagtgtggcttgtgggttgtgcaggtggagcagatagacaataaggtgctgctggctgccttccaagagaagaagaaaatgatggaagagaggacgccaaagggatctgggagccaaaggttgtttcagcaggtcccacatcagttctgcaatacggtgtgcagagtcggcttccacagaatgtattcgacatcctataacccagtttatggagccggcatatatttcaccaagagcctcaaaaatctagcagacaaggtcaagaaaacctcaagcacagacaagctaatctatgtgtttgaggcagaagtactcacagggtccttctgtcagggtaattcctcaaatatcatccctccaccattgagtcctggggccttagatgtcaatgacagcgtagttgacaatgtttccagccctgaaaccattgttgtttttaatggcatgcaggccatgcccctgtacttgtggacttgcacacaggataggacattctcacagcatccgatgtggtcacagggctactcatcaggaccaggaatggtctcttcgctgcagtcctgggaatgggtcttaaatggcagctctgtttagtgtctacatcagtttaacaagcagaaggggttgagagaactgacaaaatgataaataacaggttacctgttcagaatgatggggtcactaaaggcaccgaccacacactagcatcatagtgcctttgtctttacctctgggcttgactgggcagatgccagctaaaacttcctcactgtcttttctatttgacatctttcatctcctttcctataggtgacagcaagaatactttatatagaacaaggatatttttttcaagcctgttattttctaaaatgatagcacaaactaggacaacaggatgatttcaggttttctatataattttataaagtgctttggatatccaaataaatcacctttgtctgagtaaaaaaaaaaaaaaaaaaaaaaaa

SEQ ID NO: 1095 - DNA, 1942 bp, Mus musculus; identical to SEQ ID NO: 983

SEQ ID NO: 1096 - DNA, 448 bp, Mus musculus
tccttatccttgcaggcataaaagaagtcttggcatgccataggcaaggaagttaaatggagtagagcgatatactcctagctctctgccacatctgtcttggtcttaatgtggtagggatcaaatgggtcattataaatggtcaccttgagccaaggcctcttcctgctgacactctgaccctcttctggaagacagcaagaagctgtgggttgtgcgttgagtgttggaatcatatgttctgtgttctcccagccagccagtgacctttctgtgtgctgttccaggtttctaccctcctccagggcctcacccacctatgggctattatccaccaggaccctacccaccagggccctaccctggccctgggggccacacggtcacagtattggtcccatcaggggcagccaccactgtgacagtactgcagggagagatctttgaa

SEQ ID NO: 1097 - DNA, 1060 bp, Mus musculus
gaagacgtggcggctcgggcccgggcggcgtcgccgaggctcttctccggaccaggcttcgcagcgtgggccccgaagcaccgcggtcctcgccgccgccaccatgatctccctcacggatacgcagaaaattggcatgggcttaacaggatttggagtgtttttcctgttctttggaatgattctcttttttgacaaagcactgctggctattggaaatgttctgtttgtggccggcttggcttttgtaattggtctcgagagaacgttcagattcttcttccagaggcacaaggtgaaggccactgggtttttcctgggcggtgtgttcgtggtcctcattggttggcctctgataggcatgatcttcgaaatttatggattctttctcttgttcaggggctttttcccagtggtcgttggctttatcagaagagtacctgtcctcggatccctcctaaatctacctggaatcagatcattcgtagacaaagttggagaaagcaacaatatggtataacaacaagaactgaagaacttaaatactgtattctttataaagccctttggaagaatactcagcacaaaattaaagttcacgaactagggtgtaaagttccttacagaagtttaaaatgtacgccctccaaagtcccaacagctgtggcagaagcagcggcagaagcagcggcaggcttgtgaggcctgaggtccgaagatggggaggatgaagcctgtccgatgcttagtgacttgaaggctgtttcctagtcttgctgcagtatgtgaaacagccgttcgtacagaaccatggtgtctgttactttctttttttttttagaagattcaggaacaccaataggcatttgatttttttatgatgtccattgtggtggcccagacatatctaggtatgctgggtttctaataatgatgcctggattggattatgtcatctccatgtatcgacccaaggaagcccagtttcatgtgtgaatcactccttttttttttttttttttttttttgtaaacatagataaaataaaactttgtggtcc

SEQ ID NO: 1098 - DNA, 3069 bp, Mus musculus
ctcgggcttgtgcggagtgtggctaggaagtgtgtgcttgtcactgaaccctgagtgggtcctgtaacctttgccttccactgggtggagcaggtcctttaagagcaactggaatgcagttcccctgatcagcttagccagttattcaaaacctctgctagccctagagagcagtgctcacttcagaccaaccagcctcctgtgcttctagcttgagcaagaagtttccagcggggaagtaagtttctagctgcccagccatgggagaggacgctgcacaggcagaaaagttccagcatccaaacacagacatgctccaggagaagccatccagccccagcccaatgccttcctccacaccgagccccagcctgaacctggggtccacagaggaggccatccgagacaactcgcaggtgaatgctgtcaccgtgcacacactcctggataaattggtcaacatgctggacgccgtgagggagaaccagcacaacatggaacagcgtcagatcaacctggagggctcggtgaagggcatccagaacgacctcaccaagctctccaagtaccaggcctccaccagcaacacagtgagcaagctgctagagaagtctcgcaaggtcagcgctcacacgcgggctgtccgggagcgcctcgagaggcagtgtgtccaggtgaagagactggagaacaaccacgcccaactcctccgacgcaaccacttcaaagtgctcatcttccaggaagaaagtgagatccctgccagtgtgtttgtgaaggagccagttcccagcgctgcagaaggcaaggaggagcttgctgatgagaacaagtccctggaggaaactctgcacaacgtggacctctcctctgatgacgaattgccccgtgatgaggaagccctggaagatagtgcagaagagaagatggaagaaagcagggcagaaaaaataaaaagatccagcctcaagaaagtcgatagcctcaagaaagcgttttctcgtcagaacatcgagaaaaagatgaacaagctgggaaccaagatcgtatctgttgagaggagagaaaagattaagaaatcgctcacacccaaccaccagaaagcatcttctgggaaaagctcccccttcaaggtttctcccctctcctttggtcgtaagaaagtccgagagggagaaagctctgtagaaaatgagaccaagttggaagaccagatgcaggaggaccgcgaggagggttcgttcacagagggtctttctgaagcatccctccccagtggcctgatggagggcagcgcagaagatgctgagaaatcagcaaggagagggaacaactcagccgtgggcagtaatgcggatctgaccattgaggaagatgaagaagaggagccggtagccctgcagcaggcccagcaggtgcgctatgagagtggctacatgctcaactccgaggagatggaggaacccagtgagaaacaggtccagccagctgtgctgcatgtggatcagactgcctgagtgcacagccagaacactgggccagtgcatccacctcgtggaagccaccccgcacctcttcatctctacctgctccctactgtgactgtccaggccttaatcactgaccgtacagtagcctcaatgggatcacagaaacaaactgccaggaatcccatttctaatttgctcataggttctatttctgtagagtttctccaagattgcaaaaagaaagaaatggagcagttaaaaaaaaaatcaactatctctttggcttagtcagaaaaactggaggatatttaagttagtagttataaaaagtgattttttttttggtcattctatcagcttgctgaatagtgtagcagtaatgtagtgaattcttactgtattctgtgaatgattattcttcaagtatgtgatatggaatatacataagtctgtaagctgagaatataactctttattttaagaagaaaacatttacaaaagataaagctgaaggaccagctggttattctcttatagaaaccattgtttgttgtaagggggctgaaagacggtgctgatggtaagctaatagcaccaggactgctgagatagaaaattaagatgaaaaggttggaaagtgggagaaatggagaacaaagaatgccaaaaataatgatgacaaagagaaaaaaaaaagatgtgcttaaaaagtgaactactaacattttaaaacttattttgctctttaacaatactaaagaagttcatatgtcttgcaaaaatatatcttatcttcccaatatttttatagtctagtattataacctaaccagatgttctgatgtaaaaactatggttcttttcactaaataaatggcagtacacatctttttgtgaagaagctcaaaataatattgtctctttaacattggaacaagtgtaagtctcaaataagtagtatgtactgttttatggggatgtcaatcaaatgattattcaatatttttcactttgaagtgacctttccattccaaatatgatataggtttaggaggtattcaaacttgcatgtttaagaacagtaaaagcctgggttttctttaaacacataatggtaatttcaatccaggtaatgttttatttatacattaatttcacaggatattaatggtttagattataaaagcatgctagtattttatttcatgtgtacatttgctctaacatactacttaaaagttgctttatctatttttcattacaaaatgccaatgctttgttatattgtagtctgaagatgagagacccagggctcgaactctctactcttactgcgcagtagcacaagtgatcctacacacagtggtgactaggcagcagtcctgggctgcactctgactttcagagaaggagtgaggtgaataatgggtgttgatggtgtaacctcttcagctgtgttcctgtactgcaattaatgtaaccccaaatactgaattgctgaactaaccatgcctgtgtgaaagaagattaaataaaccaaaaataaaaagtatataacaatgtcaaaaaaaaaaaaaaa

SEQ ID NO: 1099 - DNA, 501 bp, Mus musculus
  misc_feature (315)..(315): "n" = a, t, g, or c.
cggccgccgggcagtttctgagcaatgtgcagtttacccacgccttctccagcgatctcacgaggactaagcagaccatacatggcattttggagaaaagcagattttgtaaagacatggcggtgaagtacgactccaggctccgagaaaggatgtacggagtcgcggaaggcaagccgctaagcgagcttcgggccatggccaaagccgctggggaagagtgccccatgttcaccccgcctggaggagagacagttgagcaggtaaagatgcgcggaaaggatttctttgatttcatttgtcagctaatcctgngcaaggcagggcagagagaaagcgtcctgcctggagcgccaggcagcggtttggaaagctctttggcagaggttttccctgttggaaaacatggcagcttgggggcgaatcccaaaggtggcaccctgggcttagcagccagcatcttagttgtgagccatggcgcttacatgagaagcctctttg

SEQ ID NO: 1100 - DNA, 161 bp, Mus musculus
aagccttctttccacacacttccttttccttggcccttgtgatgtctagatggtgttggcttttgaagataattgtatgatttcacactcgctcaccaagtgcttgcaagaaagaatggtttcaataatacgctgcgtatttgcagtgatcgtgacagaga

SEQ ID NO: 1101 - DNA, 3312 bp, Mus musculus
acaagcacacatttccttttaactttgcagaagaactcagagatctgcctgcctctgttcaagtacaaaaaaccacctttatctgcactcaaggcttccattagggacacagcagtgatagggtgctgagcatcgggcaagagcaacccagagtaacagctcaggaactccaccaccagggccttgcgcatccgggcactcggcaggtcgcagctggctcggcagtggcgcagttttactttcaaggatggcgcagaagaaatatcttcaagcaaaactgactcagtttctacgggaagacagaattcaactttggaaacctccatatactaaagaaaataaggaagttggtttggccgtaaaggaccttgctaagaagtactctgagcggctggagtgctgtgaaaacgaagtggaaaacataatcgaggaaatccgacgcaaagcaattgagcgcggcactgggaatgaacactaccgaacaactgggatcgccaccattgaggtgttcctgcctccaaggctccggaagcacgataagaaaagcttgttggagacccgcttgcatgtcactggtagagacctgaggtgtcaaatagctgaaactttcggatttcaagaaaattacatcaagatcgtaataaataagaaacagcttcaactagggaaaagccttgaagaacaaggagtcactcacaatgtgaaggcgatggtactggagctgaaacagtctgaagaggatgtgaggaaaaacttacagctagaggaagaggaacagaacgaggccgagctgaaggagagacgcattcagaggaccaaacggggactggagatcctggcggagagagctgagatggtggttgatccggaaacgatgccttacttagacattgcgaaccagacaggcaggtcactcagaattccccctgcagaaagaaaagcccttatgttagctatgggatatcacgagaagggcagagctttcctgaaaagaaaagagtatggaatagccctgccctgcctcctggacgctgacagatacttctgtgagtgcaaagagctgctggacactgtggacaactatgcagtcctccagctggacattgtgtggtgttacttccgcctggaacagctggaatgccttgatgatgcagagaaaaagctgaacttggcccagaaatgctttaaaaactgttacggagagaatcaccagagactggtccacataaaaggaaattgtgggaaagagaaggtgttgtttttaagactctacttgcttcagggaatccaaaactatcacagtggaaatggagaggaagctcgggaatatctcaacaaggcacggcagctctttaaggagctttacatcgatccatcaaaagttcacaacttgttacagttgggattcactgcccaggaagcacggctgggcctacgggcctgcgatggaaacgtggaccatgcagccactcacatttccaaccgcagagaggaactggcccaaatccggaaggaagagaaggagaaaaggagacgccgtctggaaaatgtcaacactttgagaggaatgggctactccacacaagctgccaaacaagcccttcaccaggccagaggcaacctggacgatgccctgaaggttctcctcagcaacccccacatgtggtggttacaggatgcagaccctgaaaacaatagccgccaagcaagtccttcccaggaaagcatcaaccagctggtgtacatgggctttgacacagtggtggctgaagctgcactaagggtgtttggaggcaatgtccagctggcagctcagacccttgcacaccatggaggaagcctcccacccgacctgcagttctcaggagaggactcctcccccacaccgtccacatccccatctgactctgcagggacctctagtgcctcgacagatgaagacatggagacggaggctgtcaacgaaatcctggaggacattccggagcacgaggaggactacctggactccacgctggaggatgaagaagtcattattgctgaatacttgtcctacgttgaaagtataagttctgcccgcaaagaacaactgatcagaaataagtgctacgtttcggctataaaattctgtggttgtaaatggttgaatgcttctttgcgttcctctatgcttttcaacgatttttctctaagtaggcttcctcctcaggtacagggaccagtgtttgaagagactttgtcagtcagaggacagtctaggaaagggaatgtcccagcctagctctgctgtgcccccgtcctcctctaggcctgcatcccagactgccactctgttggttttccattcagtgtaacagggaagcaggtcccccacccccaccccccacctcctgaggcagggtaggtagtcccggagaaggtctgcagagggcctgggactgtctcctgtcgtcttctcagctagccatcctgtgcactttgcccactgtcctgctgctgaactgccctcctcccccaccacctctgctgtgcaagcttctctcacccttgctgccctgcatcacccattgcatcttcattccaagtgctgtggagcccagcaatgacggacaggctgccagcctccctcccaccgtggcaggcggtgcagatcccttgatcgaaaaatgacagtgttttatgctctcagatcagtaaaatctgtacttgaaattaaggttgcaaaatcagtttatatggattctaaatttctcatacaaagtgaaaatcttattaaatggaaaaaatttaaatgctaaccacagcaagttatttttaattaacatctctagactggaagcttactgatagccaagggacctgagattgtgatctgctttctcaggactctccctgggtttcctataactgggtcacagaagacttgctgaagaagggcctgtcagcctttggttgcttagtcctgggtgtggccaggcagatagccttctagcacccaggcatggtaacagccagatgtggtgtgggccaagtgccactgtgttcccaagagcttttcatttcagctgaagccttgccgcagaccaagctggacaagtatgattgtctctagctattttttttttaattacacatttgtgtgggggatagggcagacataccacagcacgagtctggggctcagaagacaatgtgtggactgaactcaagctgccccgcctcctgatggtcttgctggcccccttgctgtgctttggaactgaatgatgctgatggaaataaacatggggaacgcacttgaaaaaaaaaaaa

SEQ ID NO: 1102 - DNA, 873 bp, Mus musculus
gataatctatgtgcagctcaagcaggtaggccagctttcataggtccctggggattgcagccaagagctgagtagaaagagagcagtttctggaagatgcgtccagttgctacaggcatcttcaaggcactagtgtttattttctcctccctgtgcgcctggtattctgggtacctgctcgcggagctcattcctgacgtgcccctgtccagcactctctacaacatccgaagcattggagagagacctgttctcaaagccccagcccccaaaagacaaaaatgtgaccattggtccccatgtcctcctgacacctatgcctaccggctgctcagtggtggtggccgcgacaagtatgccaagatctgctttgaggatgaagtgctaataggagagaagacggggaatgtggcaagagggataaacattgctgtcgtcaactatgagacaggaaaagtgatagcgacaaagtactttgatatgtatgaaggtgataactccgggccaatggccaagttcattcagagcactccttcaaaatccctgctgttcatggtgactcatgatgatggaagttccaaactgaaggctcaagcaaaggatgccatagaagcccttggaagcaaagaaatcaagaacatgaagttcagatcaagctgggtgtttgttgcagcaaagggctttgagctcccttcagaaatcgagagagaaaaaatcaaccactcagatcaatccaggaacagatatgcaggctggccagcggagatccagatcgaaggatgcatacccaaagggctgagataacggtgcttggacctcaataaacacgttttgtacagatatactcagctggaaaaaaaaaaaaaaaaaaaa

SEQ ID NO: 1103 - DNA, 2621 bp, Mus musculus
aaggtacagacccagccgacctgcagagatggaggcagccagcacctgggcgctgctgctggccctgctgctgctgctgctgctgctgtctctgacgctattcaggaccccggcccgaggctacctacccccggggcccacgccgctgccgttgctggggaacctcctgcagctgcgtcccggggctctgtactcggggcttttgcggctaagtaagaagtatgggcctgtgttcacggtatacctgggcccctggcgccgcgtggtggtcctggttggacatgatgctgtaagagaagccttgggaggtcaggctgaggaattcagcgggcgtggaacattggcaacgctggacaagacctttgatggtcacggagttttctttgccaatggggagcggtggaaacagctgaggaaattcaccctgctcgctctacgggacctgggcatgggcaagcgagaaggcgaggagctgatccaggcggaggtgcagagtctggtggaggctttccagaagacagaaggacgtccattcaacccttccatgctgctggcccaggccacctctaatgtcgtctgttcccttgtctttggcatccgtttgccctatgacgataaagagttccaggctgtgatccaggcagcaagtggtaccttgttagggatcagctctccatggggccaggcctacgagatgttctcctggctactgcagcccctgccaggcccccacacacagctccagcaccacttgggcaccctggctgccttcactatccagcaggtacagaaacaccagggacgcttccaaacctcaggtcctgcacgtgatgtcgttgacgccttcctgctaaagatggcacaggagaaacaagacccaggtacagaattcaccgagaagaacttgctgatgacggtcacatacctgctgtttgctgggaccatgaccatcggtgccaccatccgctatgccctcctgctcctgctgagataccctcaagtccagcagcgcgtccgggaggagctcatacaggagctgggtcctggcagggctccaagtctcagcgatcgagttcgcctcccttacacggatgccgttttacacgaggcacagcggctcctggcactggtacccatgggcatgccccacaccatcacgaggaccacttgcttccgagggtacactctgcccaagggcactgaggtcttccctctgattggctccatactgcatgaccctgcggttttccagaacccaggagagttccatccaggccgcttcctggacgaagatggtcggttgagaaaacacgaagccttcctgccctactccttaggtaagcgagtctgcctgggagaaggcctggctcgggcggagttgtggcttttcttcacttccatcttgcaagccttctccctggagaccccgtgcccgccgggtgacctgagcctgaagccagccatcagtggacttttcaacatccccccggacttccagctgcgggtctggcccactggcgaccagtccagatgaaggaaggagtttggaaggtgggagccctctgggctgaaagagccttactcagggtgtgtgtgaagcaggtgtctcagaagcaacatcacactacacaccacgtatcaaggcagctgtggagaccagggaccacaccactacacaaccgcacagcaactgatgcataggcttctttttggagagggctgtctgaaacggggatcttgttatgtggtgacacaagccgaactcaaacttgtgatcctcccgcctcggtgtcctgctcgctggaattacaggtatgcgccaccatgagctgcataggctttcagcctacatcatgtaatataggccatctggaattgcaagcatatagctagataccccgctgtccaccacacgactctgtatgctcacaactctaatccagcgactgcctacacaaacacacaaacaacccaaccgtattcaggactcttaactctgtctaacacgctcagcaccgctgttgctgggtccccgccatagaaaacagcaagccccagctggggtcatgtcacagccagaacgatgttctgtctactcccatggatgacctcaccaccatccaggctcatgagtggctctatcaacggccaccagccagtaatccacacagccaaaccatatgtgacaagatcttggcccttccaaacttcttcccactgaggcacaccgtgacgacatactattccccagtcacgtccacacccatgcccctccagcacgctccttccaacaaatgttcccaaatataaaggtttcctggtctgtgattgtgcacacagaccttctacaaatgaggaccagcgacccaaagaaaaagggtttcccagtcatgttatcaggggcctgctctcaaacgcattctgatctctgagctgcctgcaagtcctcatgagagtgctggaaatgtatcctcctcctggaaggactaactggcctcacagggatgatgcaggggagtgctgttagctgtttccagccctccttatcaggacagaagccatagctgacctctttgtgacttgaaggttcccgttttgcaataaaagtttgtttctggccc

SEQ ID NO: 1104 - DNA, 1193 bp, Mus musculus; identical to SEQ ID NO: 1032

SEQ ID NO: 1105 - DNA, 1790 bp, Mus musculus; identical to SEQ ID NO: 1050

SEQ ID NO: 1106 - DNA, 1748 bp, Mus musculus
aattcggcacgagctgggaggcagcaagactgctctgctccgcggtgccgcgtcctcttctgtagccctttgcagatgctgctcggtcttcgctctttggcttgactccgtgcttgagagggtcatttgtctccggcttgtgtagactctgcctggaagtgaagttgtggactcccgacctccagtcccgccagtcccaacctcggagtttgagtgtgatcactaatgggcaaggggtttgggctcctgaggaaaccctgccagtcagttgtggctgagccgcagcagtactcagcgctggaggaagagaggaccatgaagaggaagagagtgctgtctagagacctctgcagtgcctgggacagccctcatggtctggttggtttacacaacatcggacagacgtgttgccttaactccttgcttcaagtgttcatgatgaacatggacttcagaatgatattgaagaggataacagtgcctcggagtgcagaagagaggaagagaagtgtccccttccagctgcttttgctgctggagaagatgcaggacagtcgacagaaagccttgctgcccacggagctcgttcagtgcctgcagaaatacaacgtgccgttgtttgtccagcacgatgctgctcaactctaccttacaatctggaacctgactaaggaccagatcacggacacagacttgacagagcggctgcagggtctgttcaccatctggacgcaggagtccctgatttgcgtgggctgtacagcagagagcagcaggaggagcaaactgctcacactctctcttcctctttttgataaggacgcaaagcctctgaaaaccctggaggatgccttgagatgtttcgtccagcccaaagagttagcaagctccgacatgtgctgcgagacgtgtggggagaagacgccttggaaacaggttctgaagctgactcatctgccccaaaccttgaccattcacctcatgagattctctgccaggaactcgaggacggaaaagatctgtcactcagttaatttccctcagagcttggatttcagtcaggttctgccaaccgaggaagacctcggtgataccaaggaacagtctgaaatacactatgaactctttgccgtgattgcccacgttgggatggctgactttggtcattactgtgcctacatccggaatcccgtggatggaaagtggttctgcttcaatgactcacatgtttgttgggtcacctggaaggatgtccagtgtacctatgggaaccacagataccgctggcgggaaacggcctatctcttggtttacacgaagactggatcctgacagatatactcacacctccagagagggatagactcttatctcctctcctgtacccttgtctgctgcatttcaacgagaataataatttaaaaacaattaagccctatttataagcaaaactattattgcaatggcttagatgtagtttgtctcctgaaagctcacacacggaaggcttggtctttagatggcagtgcttaggtgacagaacttgtaagagacagggaccagtgggagatcatcggttcatgggatctctctcctgagcactaatagttcttcttcctgtttctctacacatgttgtgatgcaaatgtgggggatacaacatgccagggccaagctggttggagcctccagccttcaaaattctgaatctaataaacattaatgcacactaaaaaaaaaaaaaaaaa

SEQ ID NO: 1107 - DNA, 2000 bp, Mus musculus
gtccccccttgtccttccaagctgttcgcaccacagcctttcagtccctgctcgccgcccgtgtgccccgggaccctgaccttcgcacccctggacccattggctcctttctccttccatcccgccgaactccgactctcgagccgccgttgtctctgggacatggtcctctgcgtacagggatcttgtcctttgctggctgtggagcaaattgggcggcggcctctgtgggcccagtccctggagctgcccgggccagccatgcagcccttacccactggggcattcccagaggaagtgacagaggagacccctgtccaggcagagaatgaaccgaaggtgctagaccctgagggggatctgctgtgcatagccaagacgttctcctaccttcgggaatctgggtggtactggggttctattacagccagcgaggcccggcagcacctacagaagatgccggagggtacattcctagttcgagacagcacccaccccagctacctgttcacactgtcagtcaaaaccacccgtggccccaccaacgtgcggatcgagtacgccgattctagcttccggctggactctaactgcttgtcaagacctcgaatcctggccttcccagatgtggtcagccttgtgcagcactatgtggcctcctgtgcagctgacacccggagcgacagcccggatcctgctcccaccccagccctgcctatgtctaagcaagatgcacctagtgactcggtgctgcctatccccgtggctactgcagtgcacctgaaactggtgcagccctttgtgcgcaggagcagtgcccgcagcttacaacatctgtgtcggctagtcatcaaccgtctggtggccgacgtggactgcttacccctgccccggcgtatggccgactacctccgacagtaccccttccaactctgactgagccaggcaccctgctctgcctcacacagtcacatcctggagggaacacagtccccagctggacttggggttctgctgtcctttcttcagtcatcctggtgcctgcatgcatgtgacagctggaccagagaatgccagcaagaacaaggcaggtggaggagggattgtcacacaactctgaggtcaacgcctctaggtacaatatggctctttgtggtgagccatgtatcagagcgagacaggcaggacctcgtctctccacagaggctggacctaggtctccactcacttgcctgcccttgccacctgaactgtgtctattctcccagccctggtttctcagtctgctgagtagggcaggccccctacccatgtatagaatagcgagcctgtttctgggagaatatcagccagaggttgatcatgccaaggccccttatggggacgcagactgggctaggggactacacagttatacagtatttatttatttattctccttgcaggggttgggggtggaatgatggcgtgagccatcccacttctctgccctgtgctctgggtggtccagagacccccaggtctggttcttccctgtggagacccccatcccaaaacattgttgggcccaaagtagtctcgaatgtcctgggcccatccacctgcgtatggatgtgcccacttttttctcccaagcctcttttgggaggctgggtggccagacagacaggagccagaaacacaagggctcccactcttctcctcacagggcagcaccatggcttcatagagctggcttctctatgttgtgccccacctcacccccctgccgaggggcgtgtgctgggtcgggaagtggatgcttatccaagggccgcagatgtagctcccttgtgtccgtttcctgcctaggaagttgcctgcacgtgagagagggagaaatacatacacacctaacaagactttagaaaacaagtgttagaacacaagaaccagtttgggagtttttcttccactgatttttttctgtaatgataataaaattatgccttccacttatg

SEQ ID NO: 1108 - DNA, 3635 bp, Mus musculus
  misc_feature (2833)..(2833): "n" = a, t, g, or c.
gccgcgccgggggcggcgggatgctgctgcggatgcggagctgtgtgagccgctgcctacccggcgcagcctgggctccgcagtagcggagctcgagcatcctttagtcatctatctggggagacctggaactcaggcttcggcttcccggcaggtttgtctttaatttccaaggttgcagttctcttgacacaatccacagcatccttctctccaaccgggctgtggatgaacctgggactggactgaatccagcagctggggcagcccgggccatggtgcgtctgagccccgagctctggtaaggcagtagtggcggcgttgttcgagctaggcgggtgccactcccgggagcttcctcccagctgtcacaatgttcagttggctgggtaacgatgatcgccgcaagaaggaccctgaggtcttccagacggtgagcgatggactcaaaaaactctacaagaccaagctgctgcctctggaagagtattaccgcttccacgagttccactcgcccgccctggaagatgctgatttcgacaacaagcccatggtcctgttggtgggccagtactctaccggcaagaccaccttcatcaggtacctgctggaacaggattttccaggcatgaggattgggcctgagccgaccactgattccttcatagcagtgatgcagggagatgtggaggggatcattcccgggaatgccttggtggtggatccaaagaaacccttcagaaagctcaacgcctttggcaacgccttcctgaacaggtttgtgtgtgcccagctgcccaacgccgtgcttgaaagtatcagtgtgatcgacacaccggggatcctctctggggagaagcagaggatcagccgagggtatgattttgctgcggtcctcgaatggtttgctgagcgggtggaccgaattatcctactcttcgacgcccacaagctggacatctccgatgagttctcagaagtcatcaaggctctcaagaaccatgaggacaagatgcgcgtagtgttgaacaaggctgaccagatcgagacccagcagctgatgcgagtatacggagccctcatgtggtccctggggaagatcgtgaacacccccgaggtgatccgggtctacattggctccttctggtcccacccactcctcattcccgacaaccggaagctctttgaagctgaagagcaagacttgttcagagacattcagagtctaccccgtaatgctgctcttcgaaagctcaacgatctcatcaagagagcccggctggccaaggtccacgcctacatcatcagctccttgaagaaggagatgccctcagtgtttgggaaggacaccaaaaagaaagaactggtgaacaacctggctgagatctatggccggattgagcgagaacaccagatctcccctggagacttccccaacctgaagaagatgcaggaccagctgcaggcccaggacttcagcaaattccagccactgaagagcaagctgctggaagtggttgatgatatgctggctcatgacattgcccagctcatggtgctggtgcgccaggaagagacccaacggcctgtccagatggtgaagggcggagcatttgagggaaccttacaaggccccttcgggcacggctatggagagggagctggggagggcatcgatgatgccgagtgggtggtggcgcgggacaagcctatgtatgatgagatcttctacaccttatccccagtggatggcaagatcacaggtgccaacgccaagaaggagatggtgcgctccaagttgcccaacagcgtgctgggcaagatctggaagctagccgacattgacaaggatggcatgttggatgacgaggagtttgccctggccaaccaccttatcaaagtcaagctagaggggcatgagctgcccagtgagctacctgcccacctcctccctccatataagaggaaagtatcagaatgagagagccaggtaacctcagacagacagtatcaaaagagaggatagacatgtagaccacacacacacacacacacacacacacacacacacacacacacaacttgacagtcacactataaatgagaagggttcacctttgtctgagcacctctccaagttcccagggttggtagaagggcagctttccctcctctgtcttaggatataggcctgtgtccaaacattccctccatcttccattcccccacagacatgaggcagttaacacagatggcccacccactctacccccagtgcctccacatctaggctccgagcagatggaaaaggctttttcatggaatagaaaatttgctttattttctatgcttttattttttttccctctggggcttcctaagtagaaattgactcagggcctgggagctgtgagggaaaggagaagctgaaagaggaggaccaatctgagaaacctccatagggcactgcaccccacacttgaaaagacactggcctatgttctctgtgtttttctcaacccaagactctctgtcttcctcagtaaacatggaccttgaattctgcctgccactttgggtcaaagactcacaaacaggaaaagaaaaaagaaaaaatttggtaggaaagcaacaaggaagataaccctgtgtttttttttcaacaggacattggattggtggttcatgggtttgtcccccacccccagcgtggtatctctggatactcagtttctttatacataccaagccattcctgtgtggcaagagcagggttaggcactttctatgtattagtccctgtggccttcatgaatgccctaggcaagtttgnttccctcctgttactgcatttttcaggtgaagagccaaagactcagagtagtttagggtaccttcccaaactccgggaagtcccaagaagagaagattcaaatccagaacttgagacacccctctgtcccaattctgtgatggatgaaagatcccagtgttgctacgtggtgacaaagcacaggacagtctgaacacacagcccctcacacagccttccaaagcatccaggcaagggagggagggaggttcaccagcctttgatgggccaacaatctgaccatctgtcaccttgtagaagcaaactgtgccttctggcctgcgcctcgtgttcacaacatcacagaagaccagccaagccatcaggagagtgggctggactgctagatgttgtctgtgcctattcctgctcagcctcccgttcattagcctaaagcatcccagctcaaattcagccccaggcttttacaaagcaggacttcatgctaattcacagaaggccatcttgaaaggactgggaccttgttctctagagttccaaggactctggtgtccttggcaaaatttccatcattctcagtgccctctatctcctctgtggtctccccctggcttgccctatgcccactgttgcagtagctctctgctacactcctactgtgatggaaaacaaagcaagtataacttattttgtatctatgttcagactatatcgactgttctgtgtatcttcaatgtgcttataactgcagtgtgtttgtcattaggattcatgttaatacaacatatttaccctcgtgccg

SEQ ID NO: 1109 - DNA, 770 bp, Mus musculus
aaagcctgcgggccagcgggcgacttagctgcaagatgaggctgccctgcgaggtggaggtccgtagctgtcatttgccaaccttagggctcaagagccgaggcaagggcgtgcgagcggtggtgagcctgtgccaggccccgggcaggaatgagctgcagcctgaggcaagagcagagccgggcggccacgcctgcctgctggtctccaccatgaaggacaggcagggaaccagctacaagctaagagagaacattgagcagctcttcaccaaatttgtggatgaggggaaagccactgtccggctaaaggagcctcctgtggacatctgtctgagtaaggattccatatggccctgatataattccttaccatctttgtcaagatttggatactgccaaaacctgtgtctgtggaagattttgtctccaatctttcattcaaggaacgactacaatgaacctacactctgttgcgcacactgtggtcttagtagatagtatgggaagaacggaggctcctgttgtctcttacttttgttctctcacctgttttgtaaagccctctgatatgttgaactaattaatgtaatatcagaaaggtttctagatgtatatcagttgagtattcatttatgctttaccagtaacaaattagagaaaggaaagcattttgtatatttgtatggtaagaaaatgtatattatgttagcattttcaacatttgactcgaattttaatttaattaaagctgaatttagttttggaggg

SEQ ID NO: 1110 - DNA, 1560 bp, Mus musculus
agcgtcagagagctgagatagccctgctccatacacagatgggaccatgaactccagccacagctttaaccagacctactcggcctctgtccacagcctcggaagcacccgggggcggcaggggagctgccatcgggcaccgagtgtccatggaggcgcagggggtgtccgcatctccctttccttcaccacgccaggctgcctgcctcctggaggatcatgggggtctggaagaagcagtcccctgctaggtggcaatggcaaggccaccatgcagaatctcaacgatcgcctggccacatatctggagaaggtgcgggctctagaggaggctaactcgaagctggaaacccgtatactaaggtggcatcaggagagagaacccagccacagaaaggattattcccagtatgaggaaaacatcagccgcctgcaggagcagatagtggacggtaagatggccaatgcccacattgtcgtgctcattgacaacgccaggatggcagtggatgacttcaacctgaagtttgaaaacgaacactcgttaaagaaagacttggaaattgaagttgagggcctccgaaagaccttggatgatctgaccattgtcacaacagacctggaacaggaggtggaggggatgaggaaagagctgatcctcatgaagaaacgccatgagcaggaaatggaggagaatcacttgccgagtgacttcaaggtcagtgtgaaggtggacactactccaggggaagatctgattaaggtcttggaagatatgaggcaggaatacgagttaataataaagaagaaacatcaagagttggacacctggttcagagagcagtcagccgccatggcccaggaagtggccagtccagcgcctgtacagggcaaccaaagtgatatccatgagctgaggagaacattccaggccctagagattgacctgcaggcccagcacagcaggaaaaccgctttggaaaacatgctgacagagacccgggctcgatactcctgccgtctccaggacatgcagcagatcatctcccactacgaagaagagctgattcagctccgccaagacctggagcgtcagaacaatgaacacaaggtgctgctgggcatcaaaacccacctggagaaggaaatcgccacctaccgccggctcctggagggagacactgaagggacgatggatggatctgagtcaaggctgaaaggatctgaagcttcaacgatcaaggccatcactcaagagagtgtcaatggaagaatcgttctttctcaagtgaatgagatccaaaagcatatatgaagccaaggagtttctgcctgttgtaaaaaccacactccccctatggaaagtctttgtctccgcgctaatgggtgagtctcgacggaaatccttggagttttcagattcagaaacttttctctataatggtctcacaggacttcccatgatgctcttaatatattgttggaatttttgagtgaaagaagaagtttataaattaaagctctactctcctgctctcaaaaaaaaaaaaaaaaaaaaaa

SEQ ID NO: 1111 - DNA, 1830 bp, Mus musculus; identical to SEQ ID NO: 1053

SEQ ID NO: 1112 - DNA, 2908 bp, Mus musculus
gacgccaagagagcgagcgcggctccgggcgcgcggggagcagaggcggtggcgggcggcgggggcacccggagccgccgagtgcccctccccgcccctccagccccccacccaggaacccgcccgtgacccgcgcccatggccgcgcgcacccggtacagtccccaggactccgcaccccgcgccaccgtccagctcgcagttccgcgccaccgcggccattctcacctggcggcgccgcccgccaccgcccggaccacagcccccgcgccgccgacagccacagtggccgcgacaacggtgggggacactgctgagtccaagagcgtgcagcctggccatcggacctacttatctgccttgctgattgtctatttttataagagtttacaacttttctaagaatttttgtatacaaaggaactttttttaaagacatcgccggtttatattgaatccaaagaagaaggatctcgggcaatctgggggttttggtttgaggttttgtttctaaagtttttaatcttcgttgactttggggctcaggtacccctctctcttcttcggactccggaggaccttctgggcccccacattaatgaggcagccacctggcgagtctgacatggctgtcagcgacgctctgctcccgtccttctccacgttcgcgtccggcccggcgggaagggagaagacactgcgtccagcaggtgccccgactaaccgttggcgtgaggaactctctcacatgaagcgacttcccccacttcccggccgcccctacgacctggcggcgacggtggccacagacctggagagtggcggagctggtgcagcttgcagcagtaacaacccggccctcctagcccggagggagaccgaggagttcaacgacctcctggacctagactttatcctttccaactcgctaacccaccaggaatcggtggccgccaccgtgaccacctcggcgtcagcttcatcctcgtcttccccggcgagcagcggccctgccagcgcgccctccacctgcagcttcagctatccgatccgggccgggggtgacccgggcgtggctgccagaaacacaggtggagggctcctctacagccgagaatctgcgccacctcccacggcccccttcaacctgggggacatcaatgacgtgagcccctcgggcggcttcgtggctgagctcctgcggccggagttggacccagtatacattccgccacagcagcctcagccgccaggtggggggctgatgggcaagtttgtgctgaaggcgtctctgaccacccctggcagcgagtacagcagcccttcggtcatcagtgttagcaaaggaagcccagacggcagccaccccgtggtagtggcgccctacagcggtggcccgccgcgcatgtgccccaagattaagcaagaggcggtcccgtcctgcacggtcagccggtccctagaggcccatttgagcgctggaccccagctcagcaacggccaccggcccaacacacacgacttccccctggggcggcagctccccaccaggactacccctacactgagtcccgaggaactgctgaacagcagggactgtcaccctggcctgcctcttcccccaggattccatccccatccgggggccaactaccctcctttcctgccagaccagatgcagtcacaagtcccctctctccattatcaagagctcatgccaccgggttcctgcctgccagaggagcccaagccaaagaggggaagaaggtcgtggccccggaaaagaacagccacccacacttgtgactatgcaggctgtggcaaaacctataccaagagttctcatctcaaggcacacctgcgaactcacacaggcgagaaaccttaccactgtgactgggacggctgtgggtggaaattcgcccgctccgatgaactgaccaggcactaccgcaaacacacagggcaccggccctttcagtgccagaagtgtgacagggccttttccaggtcggaccaccttgccttacacatgaagaggcacttttaaatcccacgtagtggatgtgacccacactgccaggagagagagttcagtatttttttttctaacctttcacactgtcttcccacgaggggaggagcccagctggcaagcgctacaatcatggtcaagttcccagcaagtcagcttgtgaatggataatcaggagaaaggaagagtccaagagacaaaacagaaatactaaaaacaaacaaacaaaaaaacaaacaaaaaaaccaagaaaaaaaaatcacagaacagatggggtctgatactggatggatcttctatcattccaataccaaatccaacttgaacatgcccggacttacaaaatgccaaggggtgactggaagtttgtggatatcagggtatacactaaatcagtgagcttggggggagggaagaccaggattcccttgaattgtgtttcgatgatgcaatacacacgtaaagatcaccttgtatgctctttgccttcttaaaaaaaaaaagccattattgtgtcggaggaagaggaagcgattcaggtacagaacatgttctaacagcctaaatgatggtgcttggtgagttgtggtcctaaaggtaccaaacgggggagccaaagttctccaactgctgcatacttttgacaaggaaaatctagttttgtcttccgatctacattgatgacctaagccaggtaaataagcctggtttatttctgtaacatttttatgcagacagtctgttatgcactgtggtttcagatgtgcaataatttgtacaatggtttattcccaagtatgcctttaagcagaacaaatgtgtttttctatatagttccttgccttaataaatatgtaatataaatttaaccca

SEQ ID NO: 1113 - DNA, 327 bp, Mus musculus
tttttttttgccaataacttaatagtttattagtcagtcaacaatattacaaatatttaaaaattacttaatataaatagttggcagcaaactattccattacagagttaaattaccagtacaacgggcagactggagatttagacacctggaagataacaataaaataaactaaattatttaacaaaaattttaagctgaaggcgttttacctagtgtccataaaagcatgggttctctttttatttagaaaaaaataaaaaacggctttaacaccccattaggaatataaaataaaatcaactgaaaatattaatttgcatatca

SEQ ID NO: 1114 - DNA, 496 bp, Mus musculus
tttttttttttttttttagcttaaaatgttttattaagtatatatatattacagggtaatatttacacagttatttttttaaataaaaaagtatcttggcaaagattgcaggtattcaaagcttcaaacagtgataaattgatttaatacataaaaaaaaaacctttaagggtaacacagctgtaaaacaactttggtctttaaatcactgcaaaaaatggctactgacaaatagcatacctttaattgctatgcaaaaaaaggaccccaggagagttccttgtgcatagcaacactggagttctcttacaatttagaatggttaatggatatttatatgatgtgggaactaattctcaacaatggctttctgtaaataatgctctgcttaataaaaataagaaatgtttccctctttcacccgtgatagcaacacagaagatcccaccgatgccggttttacagaaatacttatttaaaaaagggttttctttac

SEQ ID NO: 1115 - DNA, 2889 bp, Mus musculus
cttagatgcaaggaggggatctgcagagagagaagcataaggacacagagggacgagttcccatccctgcctgcctacctagaagagatcagggtgtccagggtcacaagatggtctgtccactgcggttctgcgttcaggctagtgaagtgtgagtctccagcaccagacgctggcggagaagcacggcagagttgttcatggggagatatgacaaggaggaaacaggccagcagactgcagccctgggactgtcctggagatccagagtgccaacgctcctcaagagaaaatgtgggcgaggaatcttatggcaagggccttgtatgacaacgtccctgagtgtgctgaggagctggccttccgcaagggagacatcttaactgtcatagagcagaacacaggagggcttgagggatggtggctgtgttccctccacggtcgccaaggcattgtcccagggaaccgggtgaagcttctgattggtccagtgcaagagacccccggtcatgagcagcctactcctggacctatgcatcagacctttggccaacagaaactctatcaagtgccaaattcccaggcagcatctcgggataccatctaccaagtgccaccctcctaccagaatcagggaatttaccaagtacccactggccatggcactcagaaccaagatgtatatcaagtaccaccatcatttcagaggaacattggcggcactaatggaccccttctaagcaaaaaggtgatcaccccagtgaggacgggccttggctatgtgtacgagtacccatccagataccaaaaggatgtctacgatgtccctccttcccacagcactcaaggggtatatgacatccctccttcctcagtaaaaggccctgtgttttcagttccagtgggagagataaaacctcaaggggtatatgacattccccccacccaaggggtctatgccattccaccatcggcttgccgagatgaggcagggctcagggaaaaggaatatgatttccctcctccaatgaagcaagatggaaaaccagacaccagacctgagggggtttatgacatccctccaaccagcaccaagacagcaggcaaggaccttcacatcaaattcccctgtgatgctccaggaggtgtcgaaccaatggcacgaagacaccagagcttttccctgcaccatgcaccctctcagctgggacagtctggggacactcagagtgatgcctatgatgtcccccggggagttcagtttctggaggtaccaacagaaaccagtgaaaaggcaaatccggaggaaagagacggtgtctacgatgtccctctgcacaacccagcagatgccaaaggctctcgggacgtggtagatgggatcaacagactgtctttctccagcactggcagtaccaggagtaatatgtccacctcttccacctcctcaaaggagtcttcactgtcagcctccccgtctcaagacaaaaggctccgactggacccagacacagccatagagaagctctatcggctccagcagaccctggagatgggtgtgtgcagcctcatgtcactggtcaccacagactggaggtgctacggatacatggaaaggcacatcaatgagatccgcaccgcggtggacaaagtagagctgttcttacgagaatacctccattttgccaagggagctttagccaatgcctcctgcctcccagaactggtcctccacaacaaaatgagccgggaactccaaagagtagaagattcccaccagattctaagccaaaccagccatgaacttgatgaatgcagctggtccctgaatattttagctatcaataagccccaaaataagtgtgatggactagaccggtttgtgatggtcgccaagacagtgccagacgacgccaaacaactgaccaccaccatcagcacctacgcggagaccctctttagagcagatcctgccaattcccatctgaagaatgggcccaacagcatcatgaactcaagcgagtacacacatccgggctcccagatgcagccactgcatcctggtgactacaaagcccaggtccacagtaagccgttgcctcctagtctaagcaaggaccagccaccagactgcggtagcagtgacggttctgagcggagttggatggatgattatgattatgttcacctacagggcaaggaggagtttgagcgacagcagaaggagctcttggaaaaggctaacatcatgaagcagagtaaggcgcagctggagcatcaccagctgagtcagttccagctgttggaacaagagatcaccaagcctgtggagaatgacatctctaaatggaagccctctcagagcctcccaaccaccaacaacagtgtgggtgctcaggataggcagttgctttgcttctactatgaccagtgcgagacccatttcatttccctactcaacgccatcgacgccctcttcagctgcgtcactccagcccaacccccacggatctttgtggcgcacagcaagtttgtcattcttagtgcgcacaaactggtgttcattggagacactctgacaaggcaggtggctgcccaggacattcgcaacaaagtcaggaactccagcaaccagctctgcgaacagcttaagacgatagtgatggcgaccaaaatggccgccctccactaccccagtaccaccgccttgcaggaaatggtgcaccaggtgacagacctgtccagaaatgctcagctgtttaagcgttccttgctggagatggccaccttttgagaagacaaaggagtggaaggaactgggtgaataattactagggaaaactggaaatactatctaagtttttgtaaatggctatctatttttggtag

SEQ ID NO: 1116 - DNA, 2510 bp, Mus musculus
aagagatgggattgttataggcggaaagagagaaacccagagaagtccaggaagatgggctcctgtgcacagggattcatgctgggatgctgcctgctgctggccatcacctggggccccatcctgagccttgtgccacgcgttcaggaggaacaacaggagtgggaagagacagaggagctgccatctcctctggatcctgtgacaaggcctgaagaaacacgagagaagtatagccctcgccagggtgaggacctccccacttctcggtgctaccgatgctgtgaccccagcacacctgtataccagacaattcctccaccccagatcaacatcaccatcctgaaaggcgagaaaggtgaccgaggggatcgaggcctccaggggaagtacggcaaaataggttctacaggtcccaggggccatgttggccccaaagggcagaagggatccattggagcccctgggaaccactgcaagagccagtacgcagccttctccgtgggccggaagaaggctttgcacagcaacgactacttccagcccgtggtcttcgacacggagtttgtgaacctctacaaacacttcaatatgttcactgggaagttctactgctatgtgccgggcatctacttcttcagcctcaacgtgcacacttggaaccagaaggagacgtacctgcacatcatgaagaacgaggaggaggtggtgatcctgtatgcgcaggtgagcgaccgcagcatcatgcagagtcagagcctgatgatggagctgcgggaggaggatgaggtctgggtgcgtctcttcaagggcgagcgtgagaacgccattttcagtgacgagttcgacacctacatcaccttcagtggctacctggtcaagccagcctctgagccctagtggacactcctgtggagcttttgtggactgctgacctccttgcctggcaccctgacctatccctgcattctacagacactggagtcctgccccgggctgaccccattttctctctgctccatcctggcttccttggccttggcttccaaagttttggcttttgacaagatgcccttggccactgggaatcccaaaggatggtgcgatcccagatctggctgctactctaagcagagagctgccggcagatgaaatcattgggcggggagcctgtgaggatattggggggcctccagctccttctgtgtacacagccttagacgaccctgtgctgtgttgtcccgtggccacagggtgttccagagcacagcccctgtgtgttcccattcctggacacaagtaagcaaatatcatgggtttcttaggaacgaagtcaagcagaaaagagaaagaaaggtggtgttagttttggctttccagccagctggaaggagggaggggagagagagagagagagagctatttgtattggggaaactgaggcataggaaaaacatgaatggcaacagagtagctgcagtttgtgggtttggaaaccacatctgacttaactctagatcacatatgagctttcctggggacagcaggactgacctccgagctctgttgacatgctatagccttgcccaggggctggtcaatctttctgagccacactagtaaaagggttggaggagaacagcaagtgccccctgtggttggctctgggctggtggcagcatcctgcttgccccaactcacaggatcctgacagcagctgggaacctcagggactcctgcagctttctctgtaagaaataaagctcctactatgtcccagtacctctctgctctgctccacttccccagtcactctggaccccagggtgggagggctctcttgcctgttgggacatcagttccccttcctccttcttggtgaattaaccatggaaggaccagggctcggatttgggttcccaaactgcccttcaccatccctagtgtcctgcttccttcccagttcagcatcctgtctgggaacttgatactttaacctgctagagcggatgagtctgatagacctgcccagccctgacacagccctagtcagcttatggacacgtgagagggacttcctttgagacccagagctggggtagagctataaaaatctacctattcccgggtcaaccccaagtggtagaagaggacacaggctatcccgccctagctcagactcagggaaggcctcaggcctgattgtctgactgcagagagcctgtgttctttccccatctcaccccgtgttgatccccagggcctgggccactggatatctgctttgtgccaactaggccttgcttgctgcttcctggtggcccttggttaggatccctctcttttccttctggagctcaatgtacgtatatgccacctccgaaggggcttctgctggtcagactctccaagccacttccatgggtgtgcctacagcagaggctgctgcctcctgtgctctaccctgctctttccagaaaacattaaacttgccatggcgattcacagca

SEQ ID NO: 1117 - DNA, 2274 bp, Mus musculus
atgatgtggccccaaccacccaccttctccctgttcctgctactgctgctaagccaagccccttccagtaggccacagtcatcaggcaccaagaagctcaggcttgtggggccagcggacagaccagaggagggccgcttggaggtgctgcaccagggccagtggggcacggtgtgtgatgatgatttcgctctccaggaggctactgtggcctgccgacagctgggctttgagtcagccttgacctgggcacacagtgccaagtatggtcaaggagagggtcccatctggctggacaatgttcgttgtttgggcaccgagaagaccctagatcagtgtggctctaacggctggggtatcagtgactgcagacactcagaagatgttggggtggtatgtcacccacggcgccagcacggatatcactctgagaaggtctccaatgccctcgggcctcagggccggcggctagaagaggtacggctgaaacccatcctcgccagtgccaaaaggcacagcccagtgactgaaggggctgtggaagtacggtacgacggccactggaggcaggtgtgtgaccagggctggaccatgaacaacagcagggttgtatgcgggatgctgggctttcccagtcagacatctgtcaacagccactactacagaaaagtctggaatctgaagatgaaggatcccaagtctaggctcaacagcctgacaaaaaagaattccttctggattcaccgggttgactgtttcgggacagagccccacttggccaagtgccaggtacaggtggctccaggaaggggcaagcttcggccagcctgtccaggcggcatgcacgctgtggtcagctgtgtggcagggccccacttccgccgacagaagccaaagcccacgcgcaaggagtcccatgcagaggagctgaaagtgcgcctgcgctctggggctcaggtgggtgagggccgtgtggaagtgctcatgaaccgccagtggggcacagtctgtgaccacaggtggaacctcatctcagccagcgtcgtgtgtcgccagcttggctttggctctgcccgggaggccctttttggggcccagttgggtcaagggctaggacccatccacctgagtgaggtgcgctgccgggggtatgagcggaccctgggtgactgccttgccctggaagggtcccagaatggttgtcaacatgcaaacgacgctgctgtcaggtgcaacatcccagacatgggcttccagaacaaggtgcgcttggctggtgggcgcaactccgaagagggagtggtggaggtgcaggtggaggtgaatgggggtccacgatgggggactgtatgcagtgaccactgggggctcaccgaagccatggtgacctgtcggcaacttggtctgggatttgccaactttgctctcaaggacacctggtactggcaggggacaccagaggccaaagaagtggtgatgagtggagttcgctgctccggcacagaaatggccctgcagcagtgtcagaggcatgggccggtgcactgttcccacggcccagggcgcttctcggctggcgttgcttgtatgaacagtgctccagacctcgtgatgaacgcccagctggtacaagagacggcgtacttggaggatcgtccactcagcatgctgtactgtgctcacgaggaaaactgcctctccaagtccgctgatcacatggactggccctacgggtaccggcgcttgctgcgcttctcctcacagatctacaaccttggccgggccgacttccgtcccaaggctggacgccacagctggatttggcaccagtgccacaggcataaccacagcatcgaagtcttcactcattatgacctgctcacgctcaatggctccaaggtggccgagggacacaaggccagcttctgtctagaagatacaaactgcccctcaggagtgcagcggcgctatgcatgtgccaactttggggaacagggagtggctgtaggctgctgggacacctaccggcatgacatcgattgccagtgggtggatatcacagatgtgggtccaggggactatatcttccaggtggttgtgaaccccacaaacgatgttgcagagtccgatttctccaataacatgatacggtgccgctgcaagtatgatggacagcgagtctggttgcacaactgccacacaggagattcctaccgagccaatgcagagctctccctggagcaggaacagcgactcaggaacaacttgatctga

SEQ ID NO: 1118 - DNA, 443 bp, Mus musculus
ctttatgtttttattagatctttaaagttttattttaaaacatagaattttatatagattaacacctacatttaaacagactggtatatcaattaaatgctgtgtcacaacagttataagctctgttagaaaaataaacatctcacaacaatctacagtgtcagcttttaataaatacataaaagagaagttagtagtcaaccagttatgcaaggagattcatagtatagtacgtgaaattgtcatatttaccaagcttctgtctttaaggcaatttcaccttttatataatcaaagccagaaacaacataaaatgtgttcatgaagaatttgtttttctttgagctatttcatattcaaatgtcttgatttaaaaatacattctatattaaatgtttcttacaaaggcattatttgttaagtcaaacaaagactgttattga

SEQ ID NO: 1119 - DNA, 412 bp, Mus musculus
aattcggatccttccaaagtgcagagcaagcaccatctgatctttcccaaagaaaagtcgaagttgtgagttctgtgaggcctgcgaatcttcagactggcttgcctgaaccgttttctttaactggtggcactgagaatttgaatactgaaacaactgatagtcatgtagcagatgtactgggagcagcatttgccacaaggtcaaaagcacaaaaagaaaattccatggaggaacctgaagagatggatagtcaagatgctgagacgactaacacaactgagccgatggatcactcgtgatttaatttagaggctaataaaggcagaatgtttattgtgaatatgtaatatttgttggctgggccacataacttgagtagtcattaaaaatcttgtacgtatataattca

SEQ ID NO: 1120 - DNA, 470 bp, Mus musculus
tttttattgataagcttttcagtcctttattggtctacaacaggcataaaggctccaggagggatttctgcattctagcgtaaagtatgcaataccttaaattttaaaatactagtaattgatacaagcaaataacatcaactaaaactttttctttactagtttttccttttcttttacaagagaatagtcattgtattattatactacaaaaacatgtcaactccataattaaaaactttaaatgtcaggtatacaagtaatggtattttcttcaataattcacaattttttttttttttacagcttctgctactttggaacaaacgttaaaatttccacgatttgagtatcattaaatatgaattgaaacacttggcatctcaaagaatggcagaacttgcaattaactctgtgacattagtgatttatctccccttcgttacttaaatacacattttactaccatg

SEQ ID NO: 1121 - DNA, 389 bp, Mus musculus
gatacaacattttcctgatttgagcaaacttgggaagaaatatctaccctagtatgataaaatcagtgtgattcagttagttggtctgagatatggccagttgtgtgctcttgttgataatatgttgccagtattttttaaatcttggccttgtcaagttccacctattatttttaaaatcttacataaaagagaatggcattttgttttagaatatttaaaaataatggtagcagtagttaatttctaattttcagagtatgtcagagtcacaaagagtttatctgtatgaatggttctatagttttgacacagtggtgtgtaagcctgtatatgctaaatgtctctaagcccctatgaaccaaaaatgttttccttttttcttagtg

SEQ ID NO: 1122 - DNA, 334 bp, Mus musculus
cgattttttttcctcctttttcgagacagggtttctctgtacagccctggctgtcctggtactcactctgtagacgaggctggtctcgaactaagaaatccgcacgtctctgcctcccaagtgctggaataaaaggcgtgtgccaccactgcctggccataagttttaaaaacaactttattatgctaaaaatgttattataaaactgaactatttgttcatgcattatggtattaaactctaattagaggaaactaaagaacattactttttaaaaagccaatgtgaagttgagggggaatatattattagttttctataatacaaaatttca

SEQ ID NO: 1123 - DNA, 2498 bp, Mus musculus
cccacgcgtccgggcaggccgtggtcgttcttgctcaggtaacacacaagttagaagaacagcttgtttcctgctacgcagccaccctcagcagttcccagctcactgaagttcgggtttgcctcagaggacacgtcaagaactgatcagagaaatcccaagcgagctgcctgaaccttcgagaattctcttgttctaccttccatataaagaaccaggaccaatcgcattggtgacctttggtttccaccagctgtggatgcctttgacagtatgactgctgaagattccgccacagccatgaacagcgatccaacagtggggtcctccaccaaggtaccggagggtgtggcgggcgcgcccaatgaggctgcactgttggcactgatagagcgcaccggctacaccatggtacaggagaacgggcagcgcaagtacggtggacccccgcccggctgggagggcccgcatccccagcgtggctgtgaggtcttcgtgggcaagatcccacgtgacgtgtatgaagatgagctggtgcctgtgtttgagaccgtaggtcgcatctatgagctgcgactcatgatggatttcgatggcaagaaccgcggctatgccttcgtgatgtactgccacaagcatgaggccaagcgagccgttcgggaactcaacaactacgagatccgccccggccgtctgctgggtgtgtgctgtagtgtggacaactgccgtctcttcattggtggcatccccaagatgaagaagcgcggggagatcctggaggagatcgccaaggtcaccgagggcgtactcaacgtgattgtgtatgccagtgcggcagacaagatgaaaaaccgaggcttcgcctttgtggagtatgagagccatcgtgctgcagccatggcacgccgcaagctcatgccgggtcggatccaactgtggggccaccagattgctgtggactgggccgagccagagattgacgtggacgaagatgtgatgcagacagtgaagatcctctacgtgcgcaacctcatgatcgagaccaccgaggagaccatcaagaagagctttggccagttcaacccaggctgcgtggaaagggtcaagaagatccgtgactacgccttcgtgcacttcactagccgtgaggatgctgtgcatgctatgaacaacctcaacggcacagagctggagggatcctgcttagaagtcacgctggccaagcccgtggacaaggaacagtactcccgctaccagaaggcagccaagggtggtggtggctcggctgaggccgtagcgcagcaacccagctacgtgtactcctgtgacccctacacgttggcctactacggctacccctacaacgctctcatcgggcccaaccgggactacttcgtgaaaacaggcagcataagaggccgagggagaggcgcagctggaaacaggaccccagggcccaggggttcctacctcggaggatattccgctggccgtggtatatatagccgatatcacgaaggcaaaggcaaacagcaggagaaaggatatgaacttgtgccgaatttggagatctctcctgtcaatccagttgccattaaacctggcacagtggccatccctgccatcggtgctcagtactccatgttccaggcagccccagccccgaaaataatcgaagatggcaagatccacacaatggaacacatgatcagccccattgcggtgcagcctgaccccgccactgctgctgccgctgcagccgctgcagccgctgctgccgtcattcctgcggtatccacaccgccacctttccagggccgtccaataactcctgtgtacaccgtggcaccaaatgttcagagaatccccaccgccggcatctacggggccagctacgtcccctttgctgctcccgccactgccacaatcgccacactacagaagaacgccgcggctgccgtgtatgggggctacgccggctacatacctcaggccttccccgctgctctccaggtgcccatccacgacgtctaccagacttactgagaacgggggaccggagccaaggcaagccaccaaaccccgctgaaggaacactttattatttatgaagaaagaacgtgtcgggttggtacacgtgcaaaacctgcaggtgaagaagaatgttatcaaatagcacactgaaatattttattatatccatgaagttttcactcgcttttttttttttttttttttttgaaaatgacttttcaatttagcaggcccgcgttcatacatttctaaaagacttgcgacgcctcacgccttaatgccatctcttaaagtttgtatgctcttctgcttttgtacagaggtttggttttttgttttttaaggatatattttcagtatgaaggttattttcttaacttctgcactccagagttttctattttgtagaacctttcaaagtatatcagctatatgtatgtatatcaaaaaaaaaaaaaaaaaaa

SEQ ID NO: 1124 - DNA, 523 bp, Mus musculus
tgcagatccaagtcagggagaaaggagagcgctcatagaaacttccagatgtgggctgctgtttatctgctcctatcaatgcctgtgggccactataagggagtcaggccctttccgaagcaaggcctggagactctacctttcatgcagttcaccaatggcaaagaaacgccagctgttgtggaggaagaagtggataacaagaccccccagtctgggccagtaggagctgccccaagggcacgttccaaggacagagaccatttggacagccttagtgaaagggtacctggcgatgaaggggcacacagcagtgcctcctttggctgctaagtgaagggtgctgctcagcaggcacttctgccatgacatcctgtgtcttcttcctcagtgtgcagtggtggcaaccaacgtccatttctgagtcccctgtaacttttcacagtaccgaacatgcccattgtaacactggaacagaaagacagtggctgtcattctgatgagtgagagaggagtcgataca

SEQ ID NO: 1125 - DNA, 317 bp, Mus musculus
tagaaaatataaaaatattgctacagtgtcgttggtgctatccatcctccagggaaacatacctttgtaaattgaactactaggaactcttaatgaaattcaagtcccggatgtgccacagataaagtccccatcagggtgacatccaagcccgtccgtcctctgtccacttccagaaactgtctgcgacactccctgaatgagacaggattctcgatctttcaaaagtcgtcattgatttctgtggatatccttagagtgacactctggaaatcttggatgaatgttaggaaaaaaaaaaaaaaaaaaaaagaaac

SEQ ID NO: 1126 - DNA, 512 bp, Mus musculus
tttttttttttttttttcaatcattgtttttattaattggctttataggttaaagtgcatagtaaagacaaaaaaaggaaatgcatacaataagaaaggggctttcctagacaacattagaaaggacctgagatgcctaaatctgttctaaggaacatggaaagagatgcagatgcaggcagtaggcctggagtcggggcctgcagaagctgctggcatgctaaccctacccaggcaaaggctgcaagggagggtgcctggataaagactcacaggaggtgctgctgacactgaacctgctgacaccaccaccaccacagaacctctcctgcagagagacacatccacccctgctatctgagtgcaagtttgacgagggtgcaggggtcactcagcttgtgtctgctgtgaaagccccgccccactggggacagtgagtatataactgggccatggagagttgaagtgcctgtcacaggcctccatctccaggagggcaggagcccaaggag

SEQ ID NO: 1127 - DNA, 443 bp, Mus musculus; identical to SEQ ID NO: 1083

SEQ ID NO: 1128 - DNA, 1348 bp, Mus musculus
gctgaagcatggcgacgcccgtccctccgccttccccgcggcacctgcggctgctacggctgctgctctccggcctcatcctgggagcggccctgaatggtgccaccgcccgccgcccggatgctaccacctgtcctggaagcctggattgtgcactgaagaggcgggcaaaatgcccaccaggggcacatgcctgtggaccatgccttcagtccttccaggaagaccagcgagggttctgtgtgccaaggaaacacctatcttctggggagggcctgccccagcccagactggaagaggagatcgattctctggcccaggaactggcactgaaggagaaggaggcggggcactcaaggctgaccgcacagcccttgcttgagcgtgcgcagaagctcctggagcctgcagctaccctgggattctcacagtggggtcaacgactggagcccgggctcccctctactcatggaacctcttcacctataccccatacttccttgagttcccgagcatcctctggacctgtgcagatgtccccgctggagccccagggaaggcatgggaatggcctcacccttgtgctgatcctggctttctgcttagcaagctcagccgccctggctgtggcagccctctgctggtgtaggcttcagcgagagatccgcctgactcagaaggctgactatgctgccacagctaaggggcccacttcaccttcaacaccacgaatctcgcctggggatcagcggctggcacacagtgctgagatgtatcattatcagcaccagagacagcagatgctgtgcctggagcggcataaggaacctccaaaggaactagagtcagcttcctccgatgaggaaaatgaagatggcgacttcactgtgtatgaatgcccaggcctggcgccaacaggggaaatggaggtgcgcaacccactgtttgaccattccacgctgtcagcaccagtgcctggtccccattccttgccgccgctgcagtgactcctaggcccacatgcctgcagcccacagcccaccagtggggacgagcgagtcctggtgttccccatggaaaagagcagcattgtgacccccgcatgcttttggcaggagggaggcgccacccctggactcccttgccagggagattctccgccttatgtgggagatctagcatctgcttgcacattctctgtctggtatgaaccctcaaactggagatccaagtccaggaaccctagagcccaggcatggatagagagttttggagacaaaagccaattaaagtttttttcaaacctgtgaaaaaaaaaaaaaaaaaaaaaaaaaaaaaaaaaaaaaaa

SEQ ID NO: 1129 - DNA, 1114 bp, Mus musculus; identical to SEQ ID NO: 1004

SEQ ID NO: 1130 - DNA, 301 bp, Mus musculus
tttttttttttttttttcggacaaaaatataaatattttagaaaatctttacgataaatgaggacgtaggagcttacagagagcacagtgtttttacttcagtcacctgcagctccctaagacataaggaaacctgggaaagtgtggacagtcctctcctttgctttttacaactttaaagcaccttaatccatttgactgtggaatcagtgcaaataatccctcagaagagatacccaagattctcttttcagaggtcaatttgtttctccaagatgactaagcgagttaattgtctcca

SEQ ID NO: 1131 - DNA, 408 bp, Mus musculus
ccttggcttacccttcactttgctcatgagattcagaagctggtggtccagcaggggtgagcatttgtgaaatagtaagctgaacttagtggtgagatttcagaacagacttctgtgaagtaagagatgtaaccatgcatctaaaatcggatggccgtgtaactgctcgggcatagaaatggtgggagaacctgtcctgggtacctggcatttcacatgagcccagggatatgtcttgtgccaaggcacacaagtgtccgtggacttggacaggtgccaagggtttttgtctctgttcctatgtgggaggctggctgtgatttacattaatttctgtatttcaaacgaagatgtctgcagatctccattttgatgttacagcctcattgcccaggcagtgggcagtgg

SEQ ID NO: 1132 - DNA, 2544 bp, Mus musculus
caaggcggtctcgggcggcgtcgttgagccggctgacttcccgggaggagctgccctgcgactgagcggcggcgggcgcgcttagcgcggccaacatgcggcggagcctgcgggcgggcgcgggcggcggagaccccaggcgaaggcggcggcggcggcccgggaggcggcggcgggcggcaggctcgcggccctagcgaggctgctggggcggcggcgggagtcgtccgcgaggatgctgtcccgcaagaaaaccaaaaacgaggtgtctaagccggccgaggtgcagggcaagtacgtgaagaaggagacgtcgcccctgctgcggaatctcatgccttcattcattcggcacggtccaacaattcccagacggactgacctctgtcttccagattcaagtgctactgctttctcagcttctggagatggtgtagtttcaagaaaccagagtttcctgagaactgcaattcaaaggacacctcatgaagtaatgagaagagaaagccacagactgtctgccccttcttaccttgtcaggagcctagcagatgtccctcgagagtgtggctcatcacagtcatttttgacagaagttaactttgctgttgagaatggagactctggctcccgatacttcttctcagataacttttttgatggacagagaaggcggccacttggagatcgtgcacaagaagattacagatattatgaatacaaccatgatctcttccagaggatgccacagagtcaggggaggcacacttcaggtattgggagagtcacggctacatctctagggaatttaactaaccatggatctgaagatttaccccttcctcctggctggtctgtggactggacaatgagagggagaaaatactacatagatcataacacaaataccactcactggagtcatccccttgaacgagaaggacttcctcctggctgggaacgagtagagtcatcagaatttggaacctattacgtggatcacaccaataaaagggctcagtacaggcacccctgtgctccgagtgtacctcggtatgatcagcctccacccatcacgtatcagccacaacaaactgaaagaaatcagtctctcctggtccctgcaaatccctaccatactgcagaaattcctgactggcttcaggtttatgcccgagcccctgtgaaatatgaccacattctgaagtgggagctcttccagctggctgacctggacacgtaccagggaatgctgaagttgctcttcatgaaggaactggagcagattgtgaagttgtacgaggcctacagacaggctcttctcactgagttggaaaaccgcaagcagaggcagcagtggtatgcccagcagcatggcaagacgttcttaagttaacttatcacaagccaagtttataagagctttaaaatattttcagataaatgactgcaaacaagttctttggttaataaaggtaacttactatttggaagtataaaattctagttttacatatattttggtatcaattttttttcttttattgaaccaagaaagttttatcatttaaaaagccaattatggcatatgctaccaaatgctgtattaggaaactgctggagactctggacaaaaagtagtacaggaagagattatcagcataaacaggcattaaataggaaacccgtcacttctctgactttttatggacacacccttcttgtttaggaaacagaagaggatgagagtacatctgtgatcagttgctacgtgtggtgtcaagtgttttctggaatgagatggtttgactattaccataggtatagttcaaaatacaaaacaggacttggaacctttattgtaacaagcttgtacgtgtgtggtcatctcccccccgccccctcagtcccccgacccccaatgtaaggaacacctttgaaggagaaagatgaagtctttgaggaatacattcagaaatacaggactataataaatacatgcctcttagtgcgcaactgttgctaatacggcttccttcctttgaggcagagcacataagtacagttagcatggctctgagacacagcacaggcttcctgaccacatagaatactgccttccatcagggtgggctaagttgccaaaaacgacaatcagggatccaataagcaatcttggtcacttaagtaaattttatattgccttttttatctttgagaagtatttgtcataaaggtgtagaaacaggctgtcattccttcctatttttcttgctttgggtttaatagttgttcataattagtgctgaacacttgattacagataaacttatggaacttccagctgtaaatctagaattcttgagcttcatagctcttcagttgtgcttacaaatgttgtgaatatgtatatatattagttcttttcctaagtataagcactccatgttagaagtgactttgaattattgataaaatttcgcatttgattttatataacaagttattaaatatatttttgtggaaaaaaaaaaaaaaaaaaaa

SEQ ID NO: 1133 - DNA, 471 bp, Mus musculus
ggaagtgcactgctgactgcaacgtgctgccggctcccaggatggaggagtgaagtctcgcgtcgcagcggttccagcccccggagcctgcccgcagccgagtcctcgagagcgccctgagggagcagggtggccacctggtccaggttgcatcattggtggaaagtgcccttgctggaaagtgcccttgccggcagagccatctcactggccagagtctgatgttcttctgtttttcctgagagtcgccctctcttggattcctgtgagtcactgtcccctgtgaagcggcttgagaagaatgcctggcatcatttgtgtgctctaactccaactggagatgttgactgtgctatcgtcccagccggcttttcctctcagtgttgtttttccttgaagaagtttctttgttactattcagcttaagtgaagtcatcactgaaggaaagagcagaaggaattcggaatagt

SEQ ID NO: 1134 - DNA, 212 bp, Mus musculus
  misc_feature (21)..(21): "n" = a, t, g, or c.
ttttttgccgcgggcggggantatcctcttccttctcttctttttcctcttcctcctcctcctcttcctcctttttctggggaaagggaaggaaaaatcacaatcactgatttcagttctttttaaattgtaagtcggatgcggctgctggctgagtgtttacacattgcttgcctgctaaagtatatgattaaactgacttttttcttacc

SEQ ID NO: 1135 - DNA, 320 bp, Mus musculus
tacattgcagttttttggttttttggtttttttctttctttctttcttgaggtgtcctgatttatttttgcttagctggtgcaatattgcttaaccttggatcgttgaagacacaaggggccaaactcataatcttagatttgctaaaatattgacttctttactgttttaacttaaagcaagtgagtggagcttcctggagcatttgatggtactgtacctctgcgaatcccacagcagactttacagtcttggcggcctggaatgaagtagagcgtgtggtgtgtcaagactctttgattgtttcttaaaacaaatac

SEQ ID NO: 1136 - DNA, 362 bp, Mus musculus
  misc_feature (343)..(343): "n" = a, t, g, or c.
agtaagaagaaagtcagtttaatcatatactttagcaggcaagcaatgtgtaaacactcagccagcagccgcatccgacttacaatttaaaaagaactgagatcagtgattgtgatttttccttccctttccccagaaaaaggaggaggaggaggaggaggaagaggaagaagaagagaaggaagaggaaacaccccccccccaaaaaaaaacaacccacaaaaagaaaagatctggaaatgaatgactgaaaatgctacaaacatggaacattcggtttcgtctgctaccagcctctatgcatcgtgtcctgtttaagggcttatctactcctaaaatgcanattcttgtaataactggca

SEQ ID NO: 1137 - DNA, 343 bp, Mus musculus
tttttttttttttttttccttggtacttcctttattgtaaagcataaggaaaaaacaggttttcttgtgcacacacataaccctatgtgcctcaggattcagaactatgtacatttttttaatatgaccacaagatgaaattctttggcacattttcaaatatatttctaatgcaacctctagagagccagaccctgatcaggaacagagatggctggcttgttaaagtgctctccagcttcttagccaaaagcagtggtttgtacacacagtactgaaaggtacccgaggagtcgctactcacagtttaaatatgtcacttcactcactttgcacatggtaa

SEQ ID NO: 1138 - DNA, 1753 bp, Mus musculus
gaagccaagagctcggacagaggcggagaggggcgacaacgcaacaggtcaactacaggaagccccatactgaactcctcatgctgctgacacaggcaggatggcattgaactcagggtcacctccaggaatcggaccttgctatgagaaccacgggtatcagtctgagcacatctgtcctccgagaccaccagtggctcccaatggctacaacttgtatccagcccagtactacccatctccagtgcctcagtatgctccgaggattacaacgcaagcctcaacatctgtcatccacacacatcccaagtcctcaggagcaccgtgcacctcaaagtctaagaaatcgctgtgtttagcccttgccctgggcactgtcctcacgggagctgctgtggctgctgtcttgctttggaggttctgggacagcaactgttctacgtctgagatggagtgtgggtctctaggcacatgcatcagctcttctctctggtgtgacggggtagcacattgtcccaacggagaagatgagaaccgttgtgttcgtctctacggacaaagcttcatcctccaggtttactcatctcagaggaaagcctggtatcccgtgtgccaggatgattggagtgagaactacgggagagcagcatgtaaagacatgggatacaagaacaatttttattccagccaagggataccagaccagagcggggcaacgagctttatgaagctgaatgtgagctcaggcaatgttgacctctataaaaaactctaccacagtgactcatgttcatcccgcatggtggtttctttgcgctgtatagaatgcggggttcgctcagtgaaacgccagagcaggattgtgggtggattgaatgcctcaccaggagactggccctggcaggtcagcctgcacgtccaaggcgtccacgtctgcggaggctccatcatcacccccgagtggattgtgacggccgcccactgtgtggaagaacccctcagcggcccgaggtactggacggcatttgcgggaattctgagacagtctctcatgttctatggaagtagacaccaggtagaaaaagtaatttcccatccaaattacgactctaagaccaagaataacgacattgctctcatgaagctgcagacacctttggcttttaatgatctagtgaagccagtgtgtctgccgaacccaggcatgatgctagacctagaccaggaatgctggatttcggggtggggggccacctatgagaaagggaagacctcggacgtgttgaatgctgccatggtacccttgatcgagccctccaaatgtaatagtaaatacatatacaacaacctaatcacaccagccatgatctgtgccggcttcctccaggggtctgtcgactcttgccagggagacagtggagggccgctggttactttgaagaatgggatctggtggctgattggggacacgagctggggctcgggctgtgccaaggcactcagacctggagtatacgggaacgtgacggtatttacagattggatctaccagcaaatgagggcgaacagctaatccacatggctttgtcccagacttcctttgtcttcaacaaccttttgcaagaaaaccaagggcctgaattttaacttcctgtgcacaatgtaccttttgagatgattcgaagggcctttcacttttattaaacagtgacttgtttgactgtgaaaaaaaaaaaaaaaaaaaaaaaaaaaa

SEQ ID NO: 1139 - DNA, 1850 bp, Mus musculus; identical to SEQ ID NO: 1033

SEQ ID NO: 1140 - DNA, 3593 bp, Mus musculus
agatagttcccaaaacatgaggatatttgctggcattatattcacagcctgctgtcacttgctacgggcgtttactatcacggctccaaaggacttgtacgtggtggagtatggcagcaacgtcacgatggagtgcagattccctgtagaacgggagctggacctgcttgcgttagtggtgtactgggaaaaggaagatgagcaagtgattcagtttgtggcaggagaggaggaccttaagcctcagcacagcaacttcagggggagagcctcgctgccaaaggaccagcttttgaagggaaatgctgcccttcagatcacagacgtcaagctgcaggacgcaggcgtttactgctgcataatcagctacggtggtgcggactacaagcgaatcacgctgaaagtcaatgccccataccgcaaaatcaaccagagaatttccgtggatccagccacttctgagcatgaactaatatgtcaggccgagggttatccagaagctgaggtaatctggacaaacagtgaccaccaacccgtgagtgggaagagaagtgtcaccacttcccggacagaggggatgcttctcaatgtgaccagcagtctgagggtcaacgccacagcgaatgatgttttctactgtacgttttggagatcacagccagggcaaaaccacacagcggagctgatcatcccagaactgcctgcaacacatcctccacagaacaggactcactgggtgcttctgggatccatcctgttgttcctcattgtagtgtccacggtcctcctcttcttgagaaaacaagtgagaatgctagatgtggagaaatgtggcgttgaagatacaagctcaaaaaaccgaaatgatacacaattcgaggagacgtaagcagtgttgaaccctctgatcgtcgattggcagcttgtggtctgtgaaagaaagggcccatgggacatgagtccaaagactcaagatggaacctgagggagagaaccaagaaagtgttgggagaggagcctggaacaacggacattttttccagggagacactgctaagcaagttgcccatcagtcgtcttgggaaatggattgagggttcctggcttagcagctggtccttgcacagtgaccttttcctctgctcagtgccgggatgagagatggagtcatgagtgttgaagaataagtgccttctatttattttgagtctgtgtgttctcactttgggcatgtaattatgactggtgaattctgacgacatgatagatcttaagatgtagtcaccaaactcaactgctgcttagcatcctccgtaactactgatacaagcagggaacacagaggtcacctgcttggtttgacaggctcttgctgtctgactcaaataatctttatttttcagtcctcaaggctcttcgatagcagttgttctgtatcagccttataggtgtcaggtatagcactcaacatctcatctcattacaatagcaaccctcatcaccatagcaacagctaacctctgttatcctcacttcatagccaggaagctgagcgactaagtcacttgcccacagagtatcagctctcagatttctgttcttcagccactgtcctttcaggatagaatttgtcgttaagaaattaatttaaaaactgattattgagtagcattgtatatcaatcacaacatgccttgtgcactgtgctggcctctgagcataaagatgtacgccggagtaccggtcggacatgtttatgtgtgttaaatactcagagaaatgttcattaacaaggagcttgcattttagagacactggaaagtaactccagttcattgtctagcattacatttacctcatttgctatccttgccatacagtctcttgttctccatgaagtgtcatgaatcttgttgaatagttcttttattttttaaatgtttctatttaaatgatattgacatctgaggcgatagctcagttggtaaaaccctttcctcacaagtgtgaaaccctgagtcttatccctagaacccacataaaaaacagttgcgtatgtttgtgcatgcttttgatcccagcactagggaggcagaggcaggcagatcctgagctctcattgaccacccagcctagcctacatggttagctccaggcctacaggagctggcagagcctgaaaaacgatgcctagacacacacacacacacacacacacacacacacacacacacacaccatgtactcatagacctaagtgcaccctcctacacatgcacacacatacaattcaaacacaaatcaacagggaattgtctcagaatggtccccaagacaaagaagaagaaaaacaccaaaccagctctattccctcagcctatcctctctactccttcctagaagcaactactattgtttttgtatataaatttacccaacgacagttaatatgtagaatatatattaaagtgtctgtcaatatatattatctctttctttctttcttcctttctttctttctttctttctttctttctttctttctttctttctttctttcttccttccttccttccttccttccttccttccttcctttctttctttctttctttttttctgtctatctgtacctaaatggttgctcactatgcattttctgtgctcttcgccctttttatttaatgtatggatatttatgctgcttccagaatggatctaaagctctttgtttctaggttttctcccccatccttctaggcatctctcacactgtctaggccagacaccatgtctgctgcctgaatctgtagacaccatttataaagcacgtactcaccgagtttgtatttggcttgttctgtgtctgattaaagggagaccatgagtccccagggtacactgagttaccccagtaccaagggggagccttgtttgtgtctccatggcagaagcaggcctggagccattttggtttcttccttgacttctctcaaacacagacgcctcacttgctcattacaggttctcctttgggaatgtcagcattgctccttgactgctggctgccctggaaggagcccattagctctgtgtgagcccttgacagctactgcctctccttaccacaggggcctctaagatactgttacctagaggtcttgaggatctgtgttctctggggggaggaaaggaggaggaacccagaactttcttacagttttccttgttctgtcacatgtcaagactgaaggaacaggctgggctacgtagtgagatcctgtctcaaaggaaagacgagcatagccgaacccccggtggaaccccctctgttacctgttcacacaagcttattgatgagtctcatgttaatgtcttgtttgtatgaagtttaagaaaatatcgggttgggcaacacattctatttattcattttatttgaaatcttaatgccatctcatggtgttggattggtgtggcactttattcttttgtgttgtgtataaccataaattttattttgcatcagattgtcaatgtattgcattaatttaataaatatttttatttattaaaaaaaaaaaaaaaaaaaa

SEQ ID NO: 1141 - DNA, 1560 bp, Mus musculus; identical to SEQ ID NO: 1110

SEQ ID NO: 1142 - DNA, 368 bp, Mus musculus
tttttttttttttttataaacgaagtgtttattctcatcacgagaagcgcgcagactatatatatatacagtacacaccaacagaagtaaaaaaaaagtgcactatgcctcttctactgaaaattcacagtacaaaaagatactgccttttaaatatataatatatatatattaaaaaagaaaacaaggagaaaaacaattaaaaaaaaatcaaagttgtgactcaacgagggaacccggtgccagtggcctttgaaaggtgaaggatgcagtctggtgaggctcctctggggtgagctgtaccccatgatttgcagcaaggagctcaggacacaggcagaagaggaggagggagtgtgaagggtgtt

SEQ ID NO: 1143 - DNA, 1188 bp, Mus musculus
atgcaacagaccacagggatgcacgcctggcagagctgctcggccccccagggcgcagctacgcgcctgtgtgtgcccctggctccaggcgaaggctgcgggccccgggtgcaggcggcccgggtgcaccatcgcctgctgcagcagctgcgccggggtcctttacagagatgccaactgagcaagcttctgggctatggtccgggcgatcaggccggcgaagcccagcatggcttcctgctgcgggacccttgcgaccacccggacactcggcgcgacttgctccagcttctgggctcctgccaggaggcggcgcgcccgcagttggccgagttccaggccgactcccagggtttgctgtggcagcgtctgtgggagttgcagggagacaggcaggtgcaggtggactgcgcatgcgtcctgccggcacaggaacctcatctgcacccattgctgccagatctgcttaactctgcggtgttccaagaccgggacgcggcaagggctgtcttggaagagtgcacatcctttattccagaagcccgggcagtacttgacctagttgaccagtgcccaaaggaggtccagaaagggaagttccaggtcattgccattgaaggactggatgccactggtaagaccacactgacgcagtcagtgtcagagtctctcaaggctgtcctcctacagtcgccacccccctgtatcagccagtggaggaagatctttgatgatgaacctactatcattcgaagagccttttattctttgggcaattatctcgtggcttctgaaatagctaaagaatcaaccaactttcctgttattgtagacaggtactggcatagcacagccacctacgccatagctactgaggtgagtggaggcctacagtacctaccccctgcccaccaccctgtgtaccagtggccaggggacctgctgaagcccgacttggtcctgctgctgactgtgaattctgaggagagagtgcggagactgcagggccggggtcaggagaaaactaaagaagaggctgaacttgaggccaataatgtgtttcgtcagaaggtggaaatgacgtaccagcgtatggagaacccaagctgccatctggtggatgccagcccctcgagagagacagtcctgcagaaggttttagagctgatccagagttctggtcgttaa

SEQ ID NO: 1144 - DNA, 3466 bp, Mus musculus
ggcactatgtctcaagggttcaggggacccacaggggtgttccctcaccagacacagtcgtacttggaccctagtcatgagcatagcaagtggagatacccgcagccacaggggccggagtcttaccctaggagtttccagcttcagcagatagagtttctcaaagggcggctcccagaagcacccttgattggaatacaaacccagtcactgccgccattcctcccaggacactggccaagattcccagggccacctgcccaagacaggcaactggaaatctgggagttccccaggagtgtgactctcagaaatcaggggttccacataggacccccacttcctcccccacacagcaggggtacaccatggagaggtgctgacgggctttgctcacacttccgggagctgagcatcagtcagagtccggagcagaaggttctaaaccgcctggaagagctgggtgaggggaaggccaccactgcccatgtgctagccagagagctcagaatccccaaaagggacatcaatcgtatattgtactccctggaaaagaagggaaagctgcacagaggaagggggaaacctcctttgtggagccttgtgcccttgagtcaggcttggactcagccccctggagttgtgaatccagatagttgtatccaggaattccctagaggagagcctggtttggacagtgaggacggagaccctgcctctgacttagaaggaccttctgagcctcttgacatggctgaaatcaaggagaagatctgtgactatctgttcaatgtgtcaaactcctctgccctgaacctggctaagaacattggcctcaccaaggcccgagatgtgacctcagtgctgattgacttggaaaggcaaggcgatgtctacaggcaaggggcaactcctcccatctggtacttgacggacaagaagcgtgagaggctgcagatgaagagaagtacacacagtgctcctgcccctaccccgacagctgtcccagaggccactagaagcccctcattccctgcctgccacccgcccccagcaggtgcctcaagcagtgtggcagcctccaagagagtggagaatgggcaggagcctgcgataaagcatgaaagtaggcatgaggccagaccaggaccaatgagactgcggcctcacgcttatcacaatggcccctctagagcagggtatgtggcctctgaaaatggccagtgggccacagatgacatcccagataacttgaatagtatccacacagcaccaggtgagtttcgagccatcatggagatgccctccttctacagccctaccttgccacggtgttcaccctacaagaagctaactgagtgccagctgaagaaccctgtcagcgggttgttagagtatgctcagttcactagtcagacctgtgatttcaacctgatagagcagagtggaccgtcccatgaacctcgatttaaattccaggttgtcatcaatgggcgggaatttcccccagctgaggctggcagcaagaaagtagccaagcaggacgcagcagtgaaagccatggcgattctgcttcgggaagccaaagccaaagacagtggtcaaccagaagacttgtcccactgtcccatggaagaagactcggagaaaccagcagaggctcaggcccccagctcctcagcaacatccttgttctctgggaagagcccagttactacactgcttgagtgtatgcacaaactagggaactcctgtgaattccgtctcctgtccaaagaaggccctgctcatgaccccaagttccagtactgtgtagcagtaggagcccagaccttcccccctgtgagcgcccccagcaagaaggtagcaaagcagatggccgcagaggaagccatgaaggcgctgcaggaggaggcagccagttcagcggatgacaagtctggaggtgcgaacacagactcacttgatgaatctatggctcccaacaagatcaggaggattggtgagctcgtcaggtacctgaacaccaaccccgtaggcggcttgttggagtacgcccgatctcatggctttgctgctgagttcaagctcattgaccagtctggacctcctcacgaacccaagtttgtttaccaagcaaaagttgggggccgctggttcccagccgtgtgtgcacacagcaagaaacagggcaggcaggatgcagcggatgcagccctccgggtcttgatcggggagagcgagaaggcagagcagttgggtttcgcagagcttcctctctctggcagcaccttccacgaccagatagctatgctgagccacaggtgcttcaatgctctgaccaacagtttccagccctccctgctcggccgcaagatcctggctgccattattatgaaaagagatccagaggacatgggtgttgtcgtgagtttggggacaggcaatcgctgtgtgaaaggggactctctcagcctgaagggagagacggtcaatgactgccatgccgaaatcatctcccggaggggcttcatcaggtttctctacagtgaactgatgaagtacaaccaccacactgccaagaacagcatatttgagcttgccaggggaggagagaagctgcagataaagaagacggtttcttttcatctctacatcagcacggcgccatgtggagatggggcccactttgacaaatcctgcagtgaccgtgccgtggaaagcacagagtcccgccattaccctgtctttgaaaatcccaagcaaggcaagcttcgcaccaaggtggagaatggggaaggcacaattcctgtggagtccagtgatattgtacccacgtgggatggcatccgccttggggaaagactccgtaccatgtcctgtagtgacaaaatcctacgctggaatgtgctgggcctgcaaggggcgttgttgacgcacttcctacagcctgtgtacctgaaatctgtaaccttaggttaccttttcagccaagggcatctgacccgtgctatttgctgccgcgtgaccagagatgggaaagcatttgaggatggactacgctatccctttattgtcaaccaccccaaggtcggccgagtcagtgtttatgattccaaaagacagtccggaaagaccaaggaaacaagcgtcaactggtgcatggctgatggctatgacctagagatcctggatggcaccagaggcactgtggatggaccagggaaagagttgtctcgggtgtccaagaagaatattttccttcagtttaagaagctctgctccttccgagcccgcagagatttactgcagctctcttatggtgaagccaagaaagctgcccgtgactatgacttagccaagaactacttcaagaaaagcctgcgagacatgggctatgggaattggatcagcaaaccccaggaggaaaagaacttttacctctgtccagtacccaatgactgaa

SEQ ID NO: 1145 - DNA, 2424 bp, Mus musculus; identical to SEQ ID NO: 1046

SEQ ID NO: 1146 - DNA, 3218 bp, Mus musculus; identical to SEQ ID NO: 1044

SEQ ID NO: 1147 - DNA, 407 bp, Mus musculus
gattaagtatacgaagtgacagacatagcacagaatcatctgagactctgccccacccccagcaactgctcctggaggtgtgaaataatgcttgtgtttgttcccaacatgggcatccgaaaagtcctttaccttacccagccatccacctatacctcctccagatctcttatcctgtacagaataatgtgttttcttctaatattcttctgtgaggatataatgcatttttactatttgaccccctctgcccttagccccagtctctctctgtctagtcttcccggtccttttcctttccccaaataatcctgccactttcatgtttttaatttttgtttaaccttgattcgtcatgagggaataaacattggacatttggctagctgaaaaaaaaaaaaaaaaaa

SEQ ID NO: 1148 - DNA, 536 bp, Mus musculus
  misc_feature (387)..(387): "n" = a, t, g, or c.
gagatgtgtttccttaatgcggttctatttggcatctgtcttaattccttaatttcaactgcccacccactcaaccaagctgttgtgggtggccagtttctctccatcattagtgatgtgtagtctctcagagactgattactgactcctgtttaacctctactgccagaaaaatgttaccttatcttttcttaatttgccttgccttttattaaatgaataagtagagaaatgttagtaaaatggtaaaagggaatcacgtgacattcagggtaggaagagcttggatgctgtagatgtatgtctctctaattaacttttttttttctgtactgattcttacagcaggtttaggtatactttggggtcttttaaattcctactttntaaaatctaggatacaaatgtgaccaaaagaagatctcttatactttcatagacaaatttataaataaattctgaactacttcttatataaatgggtcatttttaacatgctgtttttattaataaattggtaatttcacataatacat

SEQ ID NO: 1149 - DNA, 1161 bp, Mus musculus
atgaaggactgcagtaatggatgctccgcgccgtttgctggagaaagaggatcagaagaagtggcagagacttttagggccaaagatctcatcatcacaccagccactgtcttaaaagagaagccggacccggattcgctggtctttggagctacgtttactgaccacatgctgacggtggagtggtcctctgcgtctggatgggagaaacctcacattaagccttttggaaacttgcccatacatcccgctgcctctgttttgcactacgctgtggaactgtttgaaggcttgaaagcctttcggggagttgataacaagatccgattgttccggccggacctcaacatggatagaatgtgccgatctgctgtgaggaccacgctgccgatgtttgacaaggaggagctcctaaagtgtattcttcagcttctacagatcgaccaagaatgggttccctactccacctctgccagcctctacatccgccccacatttatcggaactgagccatctcttggcgtcaagaagccttccaaagccctactctttgtgatcctgagccccgtgggaccttatttttctagtggatcttttactccggtgtccctgtgggccaatccaaagtacatcagagcctggaaaggtgggactggagactgcaagatgggcggcaattatggagcctcccttctggcacagtgcgaggccgtggagaatggctgtcagcaggtcctgtggctgtacggcaaggacaaccagataactgaagtaggcacaatgaatcttttcctctactggataaacgaagacggagaagaggagctggcaacgcccccactagatggcatcattctcccgggagtgaccaggcagagcatcctggagctggcacaacagtggggtgaatttaaggtatgtgagagacacctcaccatggatgacctggccaccgcccttgaggggaacagagtgaaggagatgttcggctcagggacagcctgcgttgtctgcccagtctctgatattctgtacaagggccagatgctgcatattccaacgatggagaatggccccaagcttgcaagtcgaatcctgggaaagctgactgatatccagtatggaagggtggagagtgactggacaatcgagctaccctga

SEQ ID NO: 1150 - DNA, 1681 bp, Mus musculus
gaattccggcgatagtgatgtctgcggccaagatctggaggccgagccgtggcctgcgccaggctgctcttctcctgttgggacgatctggggttcggggcttggctagatctcaccccagcaggcagcagcaacagcagttcccatccctggacgacaagccccagttcccaggggcctctgcagagtttgtagacaagcttgagttcatccagcccaatgtcatctccggcatccccatctaccgtgtcatggaccgccagggccagatcatcaaccccagtgaagatccccacctgccccaggaggaggtgctgaagttctaccggagcatgacgctgctcaacaccatggaccgcattctctatgagtcccagcgggagggccggatctccttctacatgaccaactatggcgaggaggggacacatgtgggcagtgccgctgccttggagcgcacagacctggtgtttggccagtaccgggaggcaggtgtgctcatgtaccgggactacccgctggagctgttcatgtcccagtgctacggcaacgtgaatgacccaggcaagggacgccagatgcctgttcactacggttgcaaggaacgccacttcgtcaccatttcttctccactggccacgcagatccctcaggcggtaggggcagcctatgctgccaagcgggccaatgccaaccggattgtgatctgttactttggcgagggggcagccagtgaaggggatgcccacgccggtttcaatttcgctgccaccctggagtgtcccatcatcttcttctgccggaacaatggctatgccatctccacaccaacctctgagcagtaccgtggggatggcatagcggctcggggccctgggtacggtatcaagtcaatccgtgtggacggcaacgatgtgtttgctgtgtacaatgccactaaggaggcccgacggcgggctgtggctgagaaccagcccttcctcattgaggccatgacctacaggattggccaccacagcaccagtgacgacagctcagcgtaccgctcggtggacgaggtcaattactgggacaagcaggaccacccaatctcgaggctgaggcagtacctgctgaaccagggttggtgggatgaggaacaggagaaggcctggcggaagcagtcacgaaagaaggtcatggaagcctttgagcaggctgagcggaagctaaagccgaacccaagcctcctcttctccgatgtgtaccaggagatgcccgcccagctccgcaggcagcaggagtcgctggcacggcacctgcagacttacggggagcactaccccctggaccactttgaaaagtgaggccctagccagcacaagggggtcctgctctgagtggatgctgccccctgtgctagtcagctgtgcgaacatgctgagcagccagggtggcattccagggtgacttttgctcctgttcctgctcccccaggctacttcactggggcaccatgtttgcagccattgctgcggctacttcactcccttcacctgttacagtaccttttaggggtgggaagggaccagggccagggaagaccctctgggcagggtggccctgggcttgcccagagagatagctgattggcagagtaagtaaaccacaggtctgcctttgaaaaaaaaaaaaggaattc

SEQ ID NO: 1151 - DNA, 299 bp, Mus musculus
tcgtcgacatggtagacctctgctccttgtgagctgtcgctggtgaaggtggctattctccagctccctccccaacttctttggcttcctcgcagagctagaacatgaaatactgttacttgggataataagggaggggacatgtgaccagggaccctggattttggctgaagacttcctgtcaggttctctacagagactttgtttcaaatacctctggggggttggtcttgggtggggaactttagtgcaaagagcccccctcttttatattgttaatttaacataaagagcttcta

SEQ ID NO: 1152 - DNA, 1580 bp, Mus musculus
ctgagaaggaaaccgcatcttcagacttctgctcactcacgagaggagctagggtcatcggacccctaagatcctttcacatcgctccgactcgccggaacactcctcaccagtttcctcagccacagccctacctgtgagctccggacttccccggctttctgtggatgctcaggcagactgcagagacctagcctaggacagcagtgagggggacactcctctcctctcctctcctctggtatcagcgtctcccccaagggggacgagcatggtgattgtgccttgaaggaccttggctctggatgtctgagaagatgctggtcatgaagctgttcacttgcttcttacaggtcctagctgggttggctgtgcattcccagggggccctgtctgctgggaacaactcaacagaagtggaagtggtgcctttcaacgaagtgtggggtcgcagctactgtcggcccatggagaagctggtgtacatcttggatgaataccctgatgaggtgtctcacatattcagtccgtcctgtgtccttctgagtcgctgtagtggctgctgtggtgatgaaggtctgcactgtgtgccgataaagacagccaacatcactatgcagatcttgaagattccccccaatcgggatccacatttctatgtggagatgacattttctcaggatgtgctctgtgaatgcagacctattctggagacgacaaaggcagaaaggaggaaaaccaaggggaagaggaagaggagtagaaactcacagactgaggaaccccacccgtgatgtcatttcccggaggtaaccagccactcagaggagagccccacacccagctcacgtatttattaccgtcaccctctcagaaccctccctgctggtacctaccctctatttattagccgactcgtccctgctgaatgacgtgccccctccaagataaggggcatggaaggacaagacgctcaggaattcagtgccttaaaacagaacgagagagaaagaaagaagccagccacggatctgtgggagcttcggcttgggaagaagcaagacatggacatggccttacaaggggcaagccgcaccccagaggccctggctctccagggaactggagaagagaagaggaggcctagaacctgccctgattcccagctccacccagagagcagctctggccccggctgcattgaaggcatgtagaggggacccagtctactgtatcctggagatgggacaggacattcggctctggagagcagagcttgcctgtggagtttgcccttcagcctagaagtttatgcttcaccctttgcaaaggtcctttgtcccctctctggaacacaggcagagtggcctggggctgagcagagggcaggctggaggagcagtagcccgtggactttgaccgatacaagtctgggttgtgtgtcttcgtggtacagctacgggaagtgagccgactcctggagggcccttgcagcccaccggttgtctctgccgggactaactgccaagccagattctcttgaataaagcattctagtctggaaaaaaaaaaaaaaaaaa

SEQ ID NO: 1153 - DNA, 465 bp, Mus musculus; identical to SEQ ID NO: 1079

SEQ ID NO: 1154 - DNA, 383 bp, Mus musculus
tttttttttttttttttccgttcaagagtttgtctgaaattgaagttacaagtgtcatacatgtaagccggctgctggaccaggagaccagaggctcaggagcatcacattctttcatattctggacacaggtaaaagagaaatgaaaactcccaactgcatagaaagtgaggaaatggacagacaaagaaacaaaatacctttcctttcctcccctccacaccccatgactccccacacttgagtgcattaagtaggcaagctttactcgttcagtctgcagaatccaacgtatcattagaaggggggaggggaggtgcgtatctcagtctgtaagtgccttgctgattggcctccatggatgactgcttacagtcttgtgc

SEQ ID NO: 1155 - DNA, 311 bp, Mus musculus
tttttttttttttttttggaccacattattaaattgttgagctgcagctgagttgctgaggggagagctttgctaagccttgcacaggtgcgtgtgactcatcgccaggtgtactttatggagcttattttatgatttcaaatactgtactgtacataggaggtatgttaccttctccttatttgtatgtttaccatatactttgatatttgaaatgttatgtactggaaaggccacttatatttctagaacagattggattttatgcaatctttttccttgaattaacagcaataaaaaacctcgtgccg

SEQ ID NO: 1156 - DNA, 518 bp, Mus musculus
tctcttgagacaactgaaactttatttctgtgatttaaaaagggtgcaagaacatgactttttaagccttcccttccctcctttacatacgctacagtcttattaccgaacaacaaggcaggagacacagagtttggaggggccaatgcaatcatcatggcagaaagctccacatcctttgcacatgatcatggctttcaaccggcagtaacattttgatggtgtgtcctcgatactattgtcatcaggaaaagtctgaacaggaattgtctggccatggctgctgggattcattgcttgactggcagggatggtagtgacagtcactgaaaacgacatgacgtcccctacattgctagatacctggctgcctggtatagcagagttatggtccatgtctgatgaggtggagacattgatcatgcctctatagcttggccctatctgtgtggggcttccatacaatttgggggtttgcagtggtggaaggagtagaggctgatgtgtgggactgtctg

SEQ ID NO: 1157 - DNA, 571 bp, Mus musculus
tttcaagacagggtttctctgtataaacctggctgtcctggaactcactctatggatcatgctggtctcaaactcaaaaatccgcctgcctctgcctcccaagtgctgggatcaaaggtgtgcgccaccaccgcccggcctggcttgtatttcttactggtccttcacttcagaacatacacacttcttaaccatgaatccttgaagcctttcttctcccttatctatgcatttcttgaaataaagggggaaggtggaaggatatcacattgtcttgactagtgctgtatacagaatttaaactgtaattgcttaggtccacaatagcagggaggaaaaatgaagggtgagcttcatagtttggagcagggactgaggaagcattcccagtgtttgatgcaaaaaggtagggtggtcaggggagggcatcacaaggcaggcaaaataccttactgtctcctttctccaatctggaaggtgatataattagcaagttaaattgttctgagttttataaatagcttttgaaatacacctatactgggttgcaatattacaccacatacttcaa

SEQ ID NO: 1158 - DNA, 3009 bp, Mus musculus
ggccttgagagaagtcgggcgcttcgcggcgattggagctgcagtttctactgcggtgtcaccgggataaccacaaagggcaccgcttgtctgtctccgcctctgactacccgtgatacttaaatacatctgtgtttttggacagcatttataatggagtttcctgacttggggaagcactgttcagaaccaacttgcaaacagctagattttctgccaataacatgcgacgcctgtaaacaagatttctgtaaagaccatttttcctacgtgggtcataagtgtccctttgcgttcaagaaggatgtgcaggtgcctgtgtgtcctctctgcaatgcccccatccctgtgaagagaggtgagatcccagatgtggtggtcggcgagcacatggacagagattgcacctttcaccctgggaggaacagaaacaaggttttcacacatcgctgctccaaagagggatgcaggaagaaggagatgctgcagctggcgtgtgctcagtgccatggcaacttctgcattcagcacaggcatcctctggaccacaattgccaggctgggagcagctcagccagcagagggaggacttctacatccagagctgctgagcagaagccatcgggagtcagttggctggcccagcggctcaggcgcacagtgaagtgacagcgagtctcctgtgggtgccacacaccagctccttcctgttggattttgatcttgggacgtgtcctccaacacttttcctgcttcttctgcatctgagtctttatagaagagtctcccattgactgttcaagttacggtgaattgatggctcagtggggaaagcacttgccccacaggcatgaggacctgagttcatccccagaactggatgtgactggtgtacacttgtcatctcagcacttgggaggtggtgagaggaaaatctccagggctttctgaccagcagcctagccatattggaaagttccaggccagaaagacgctgcctcaaaaaccaaggtggacactttctgtggagggacatcagaagttcacctctggcctcacacccacacccacacacccacttgtgtatacacacacacacacacacacacacacacacacacacacacacacacccgaggctgtccagcaacttacttggggtgggttaggttaccatagcaaacagctgcagggttcaaggcctgaggacttgcttaactctcctcagtggtggctttggcctgtgctaaacctctccaggacttggtattccagaaaattctgtcctgtgacagaaaagaaccaccgtctgctctgtattctcccctccatggcttttgtaataaggtgcctttgggcacagtctactcatggtccccaagaacaagagtggacggggtgccctttccttacctactggctggggatgctatggaggaagggtgtgcacttggcctgcagtgatgtctccaaggttgacttaagcaaccagcctcaccatgccaggactccgcatgcctggcttcaggctgttttgtggtttgaggcagtgtctcactgtggagccctggctgtcatggaactcaccctgtagaccacactggccttgaactcagtgatccccctgactctgcctcccaagcgtggattcacttttaactcccaagaagagcaccaagaaatgagagccatttcagaaatgtctggttttgccatagaagcttctcctcttcgtgccgaatccccatggcagcaggctgagggtgtcctcagcactttgtggagcagaaacccagacagaagaaaagcagtggttctgggccttggggtgcagccaccatcactcctgtgccacctgtgtggcctgaaccatgtctacccccaaatggccatggcagtgtaggggaagatgcttggggtactctggtgacctgtataagcgtttaccctcactttccaggagcttggctattagagatgacatgggaccaaccacccagcgggttttgactttcgcccttagttctgacagcctttgggacagttaactgcatgaattccatacatagcagctttgtgcagggttcgtggcctctagctgtcctgggaggcaggggtgggttctactcactctgttctctaagccagtgcctctcgtcacatcagtccagctctagactcatcggtgcactcatcctggccccagtgcctggttagatcggggggtggggggctgggggggtatttgcttttagaacaaggtctaggcagtggtgctatgtggggacattgagacaaaccaatcttttgtacttccacttcccagcactctttcttggtggtacacacttgaagtatagctagcataacaaagcttttgattcaacttaagttgtaaaactactgggtgcaataattacgcggtgtctaaaaggggagttggatatatacgtctccgtcctaaccatggtatgcaatagtgtttccactgagatgactctaagttggaaattaaaagcacactgggcgggctggggaatggtccagtgattaggagcctgaacctttctgcagaggaccagagtttggttcccagcaccacccatattagatggctcacaactatgtgttaacctcagctccaggggcaaatgatgcctctgagctactggtccttgcactcacatgcccatgttcttaaacatgaattcggaagtacagtggcaaaggtwagagcctagcgttgtgggttaacccttacccagagcccaccagtgaggagctggggccacaattcaatagaagagcacttgccaagaacccctcgggcctggtttagtggagtacctgcctgtcatgtcatcaggcctcagattctctccctactgcaaggaagcaaaatcaccaggctttagagacaatatcaaatgcaagacattgtgtgttgaaatatcttatgtataatggttaataaaaattatttatttcacccaaaaaaaaaaaaaaaaa

SEQ ID NO: 1159 - DNA, 332 bp, Mus musculus
tttttttttttttttttcacctcctccaatgtattcatctggacaggcagaggtgtcctgcaccaaaaaaattaaaaaatgaccgtaccttccaccactctgaaaagtcaataaataactacaaggtaggagcaaaacagaagcaagtgcctggcctctgaccagcagtctcaggggcctgcaaggtgccaggacctcatccagcctgctctacagaacagctccgcccatcagctccagctgtcggtgagggagctggagacacccaaagccacaaggacccttgtgtggctttctccttctttactccagtggaccagcctggttctggg

SEQ ID NO: 1160 - DNA, 1043 bp, Mus musculus
ggagaccctgtgaatttcgtcctgtctcacgatttttcaggagccagggcgtcctgctcgggaggcaccagcagcctcaagtcggaaaactcatcgcgctccggcagaccccggccctctcgctcagcttccggtgcctcggaacctcctctccgcagttcagtgcaacctgcatgcgactccgccgccggaacccatcccgtaggcaacacagtagcgatgaagcaaaagaaaaagaaaacccccaacagggtctctgggacaaatggaagcgaaaagccctcggagaaacctgccccggacgaagctcctcctagcgctgaggcccaggcggaacagctggcgcgggagctggcctggtgtgtggaacagctggagctgggtctcaagacgcagagacctaccccgaagcagaaagagcaggctgttggggcaatccgaacgctgcgcagtgaaaaaacccccttgccccggaagagacagctgatgcgctccttgtttggggactacagggctcagatggatgcagagtggcgggaggccctacgggctctaaaggctgccacccattcggcccaggtacagctcgtcagtgaggccaccagaaagaagagcggaagggtctgcaggcctcgtcctgcagaaagagccaaaaccactccggacttgaccagcgaagagtttcggttcaatttcttttagggtctcctacatgctggaccgctcatccccctccagggtggggtggggatgtgtcctgattgcagggccttcccaggaattctctcagcagaagtggggttggtttgtccttcattgcagcatggacctgaagcggctggcctatgtgaggctgctatgtggatgtggaaacctttgaaggaaatgttcttcatgtcagaagagaggtgcagagtagctgctgatgataaggaactgtggggaagttgtggacacagtgggctcacttttgaaaagatgctcaggccatttttctagtgctttgtatattgttatatcgccttaataaatcttctctaagg

SEQ ID NO: 1161 - DNA, 1196 bp, Mus musculus; identical to SEQ ID NO: 990

SEQ ID NO: 1162 - DNA, 952 bp, Mus musculus; identical to SEQ ID NO: 1089

SEQ ID NO: 1163 - DNA, 3012 bp, Mus musculus; identical to SEQ ID NO: 1094

SEQ ID NO: 1164 - DNA, 500 bp, Mus musculus; identical to SEQ ID NO: 1093

SEQ ID NO: 1165 - DNA, 254 bp, Mus musculus
  misc_feature (75)..(75): "n" = a, t, g, or c.
tggcgcgtttgcaataagatcccagaattgtcaagaagtgtgcaggtttcaattccagtgtgagatgttaacacntgttccatttaccgtcgctacactgctttcatccccatgaattacaggaggctttatttgcaacttgtgtaacacttcctgttttttaggttttactgatcaggcttgtgagccattcaaaataatgtttgtgatccctactattgattctgcccttggagcaaactgaataaagcaac

SEQ ID NO: 1166 - DNA, 333 bp, Mus musculus
cggcgggaacaggagtagggactgtaagtaggaaaggaagtattggtacaggctatttctggtttcgtcaatcatcgctacccttcgggctagtttttgaacagcatagaaacgggctcttagggtctcttcactgtataccccccgggtcagggactctggaggaatggctgcagttaaagcctgggtaaattcattatcagaacagttgactctgatggcctcaactgcactccccaatgggatggtaggcatttctgcagatgaggtcttcatgctgtactttaatgcctccactgaaagccagagctggtgggcttttccctcgtgccg

SEQ ID NO: 1167 - DNA, 641 bp, Mus musculus
  misc_feature (15)..(15): "n" = a, t, g, or c.
  misc_feature (29)..(29): "n" = a, t, g, or c.
  misc_feature (49)..(49): "n" = a, t, g, or c.
  misc_feature (55)..(55): "n" = a, t, g, or c.
  misc_feature (106)..(106): "n" = a, t, g, or c.
  misc_feature (113)..(113): "n" = a, t, g, or c.
  misc_feature (146)..(146): "n" = a, t, g, or c.
gacatcaagggtagngcatgtgcatacangagtaaagaaagccaataancgacanaaaaataccccaagaaaggtgagatcaatattgcagctttaactctaaagnagcaagngtatgagagaaagcaatgagaagaagagggaanaatgtagtaccctggcttcttgggcctcggcttttttaatagtgtgcatccaagaccagacagcagtagaccgaccatataaaaacaagactgtcacctgcaatgttatcctttttggacatctattgactatgctctaatctttgatttaaaaaaagaaaaaaagtacacatgcatacatagttctaaggcttaaagaaaaattaagaggcaaaagcaaagatgctaattttttttcagtttacctaaaccaaatcaagaaaatttagaccaaccccaaagagaccagctaaagcagcagactctgcatctccaatttataacttaaaccaaggaactcatgtcagaagaatgaaattgagtagagaacatgaatccacatgtaatcttatatctgagaagactgagcctgaaggattgtgaagtcaaggccatcctgagctatggtgtatacaggtcaaagacagtctgagctacacacggcaaaatgtatca

SEQ ID NO: 1168 - DNA, 1319 bp, Mus musculus
gggtggaagggcacgttccttttttcctttctttctttttgtctttctttctttctttcccaaatgaactctatgttctccactctccagtgacatttgtctacgaggcatagatttaaggactgtttgatcccttgcagatcatgattctggaaggaagtggtgtaatgaatctcaacccagccaacaacctccttcaccagcaaccagcctggacggacagctaccccacatgcaatgtttccagcggtttttttggaagccagtggcatgaaatccaccctcagtactggaccaaataccaggtgtgggaatggctgcagcacctcctggacaccaaccagctagacgctagctgcatccctttccaggagttcgacattagcggagaacacctgtgcagcatgagtctgcaggagttcacgagggcagcaggctcagctgggcagctgctctacagcaacctacagcatctcaagtggaacggccaatgcagcagtgaccttttccagtccgcacacaatgtcattgtcaagactgaacaaaccgatccttccatcatgaacacatggaaagaagaaaactatctctatgatcccagctatggtagcacagtagatctgttggacagtaagactttctgccgggctcagatctccatgacaacctccagtcaccttccagttgcagagtcacctgatatgaaaaaggagcaagaccaccctgtaaagtcccacaccaaaaagcacaacccaagaggcactcacttatgggagttcatccgagacattctcttgagcccagacaagaacccaggactgatcaaatgggaagaccgttcggaaggcatcttcaggttcctgaagtcagaagctgtggctcagctgtgggggaaaaagaaaaataacagtagcatgacatacgagaagctcagccgggctatgagatattactacaaacgagaaatcctggaacgtgtggatggacgacggctggtctataagtttgggaagaatgctcgtggatggagagaaaatgagaactgaggctgccagcccttgggacacaaaccaaaacacacagcaaatggattctgatcaatgaagaaccggacgtaaatatctcaaagactacttttctgtgatatttatgtaccatgaagggacaaagaaaatctacttctgacgggaagaaggaacactacagttgataaaaaaaaaattattttgttactttgaagtatgtccttttgtggggaacaaatgtacacagttttctgtgaactatgaagctgtatgtgattgtgaaaaaaaaattcc

SEQ ID NO: 1169 - DNA, 374 bp, Mus musculus
tttttttttttttttttgccacgaaaaaaagtccataaagaccttttcagccagaggaatgctctgtttcaacggccatcattcccagcagtgaagcgctataatcggaaaggaggacatttgcagatgttgaagatggagtataggtttaagaagaaggaaaaattactccggaagaaactagctgcaaaggggattgattatagttttccctcactggtcctacctaagccaaagaacattgctgtcgctcatagagattctgagggtaaccaggttttacctgaccaaaaagaagggctttcgggtgaacctaggagaaaggagaagatgatgaaagaggacatttccaataacattcctaagaagcgtaa

SEQ ID NO: 1170 - DNA, 503 bp, Mus musculus
  misc_feature (474)..(474): "n" = a, t, g, or c.
tttttttttttttttttcaaggagattgacagttatattcaagaaacccaaattagtaaaacaaaagcatagaaagggtacagaaacttacaacaggagatggtgacatttcttacttccccacaaagttcttaggttctcttgtacacaaataaactgtagaaaagtctggtcagtgaatcttgaatacaactgctgaaactgatttgtgacacctacacactagcttagctgcagtaactgtgggtcatttcggactcctcctcagctcctggacacatgtggaaatctaaaccagaactgccctctcactctctggatttcatttccagtttcagatgtctgaggctgaagcctgacatattttggaggggtttagatacacaactacacaccgtccaaacagcaccaatcggttgtttggtggtagttaagcctgagtttcataaggatagtaaaactgagggaccgatnaagcctgaagacaaattcaggacaggaaa

SEQ ID NO: 1171 - DNA, 8797 bp, Mus musculus
ctggtgcaccgggagtccgatgagttttctagacaaggtgggtgagtgacaggtgccacaactccagcctccccttttctgaaagtcgcggagttctgtttcatctggaataatggatgtaaaggaccggcgacatcgctctttgaccaggggacggtgtggcaaagagtgtcgctacaccagctcctctctggacagtgaggactgccgtgtgcccactcagaagtcctacagttccagtgagaccttgaaggcttatgaccatgacagcagaatgcactatggaaaccgagtcacagacctggtgcaccgggagtccgatgagttttctagacaagggacaaacttcaccctggcagaattgggaatctgcgagccctccccacaccgaagtggttactgttccgacatgggtatcctccaccagggctactccctgagcactgggtctgatgcagactcggacaccgagggagggatgtctccagaacatgccatcagactgtggggacgagggataaaatccaggcgcagctctggcttgtccagccgcgagaactcggcccttactctgactgactctgacaatgaaaataaatcggatgacgacaatggtcgtcccattccacctacatcctcgtctagcctcctcccatctgctcagctgcctagctcccataatcctccaccagttagctgccagatgccattgctagacagcaacacctcccatcagatcatggacaccaaccctgatgaggaattctcccccaattcatacctgctcagagcatgctcagggccccagcaagcctccagcagtggccctccaaaccaccacagccagtcaacactgaggccccctctgccaccccctcataaccacaccctgtcccaccaccactcctcggccaactccctcaacaggaactcactgaccaatcggcggagtcaaatccacgccccagctcctgcgcccaacgacctggccaccaccccagagtctgttcagctccaggatagctgggtgctgaacagtaacgtcccactggagactcggcacttccttttcaaaacgtcgtctggaagcacacccctgttcagcagctcttctccgggataccctttgacctcagggaccgtttatacaccaccaccccgcctgctgccacggaatacattctccaggaaggccttcaagctgaagaaaccctccaaatactgcagttggaaatgtgctgccctgtctgccatcgccgccgccctcctcttggccattttgctggcatatttcatagcaatgcatctgctcggactcaattggcaactccagccggcagatggacacacctttaacaatggcgtaaggaccggcttaccaggaaacgatgatgtggcaacagtgccatctggaggcaaagtgccctggtcattgaaaaacagcagcatagacagtggcgaagcagaagttggtcggcgggtgacacaggaagtcccaccaggggtgttttggaggtcccagattcacatcagtcagcctcaattcttaaagttcaacatctccctgggcaaggatgccctcttcggtgtctatataaggagaggactaccaccgtctcatgcccagtatgacttcatggaacgcctggatggaaaggagaaatggagcgtggtcgagtcgcccagggaacgccggagcatccagactctggtgcagaacgaggctgtgtttgtgcagtacttggatgtgggcctgtggcacctggccttctacaatgacggcaaggacaaggagatggtctccttcaacactgttgtcttagattcagtgcaggactgtccacggaactgtcacgggaacggtgaatgcgtgtctggactgtgtcactgtttcccaggattcctaggtgcagactgtgctaaagctgcctgccctgtactgtgcagcggaaatggacagtattctaaaggaacgtgccagtgctacagcggctggaaaggtgcagagtgtgatgtgcctatgaaccaatgtatcgatccttcctgtgggggccatggctcctgcattgatgggaactgcgtgtgtgctgctggctacaagggcgagcactgtgaggaagttgattgcttggatcctacctgctccagccatggtgtctgtgtgaatggagagtgtctatgcagccccggctggggtggtctcaactgtgagctggcgagggtccagtgcccagaccagtgtagtgggcatggcacttacctccctgactccggcctctgcagctgtgatccgaactggatgggtcccgactgctctgttgtgtgctcagtagactgtggcactcacggcgtctgcatcgggggagcctgccgctgtgaagagggctggacaggcgcagcttgtgaccagcgcgtgtgccacccccgctgcattgagcacgggacctgtaaagatggcaaatgtgaatgccgagagggctggaatggtgaacactgcaccattgatggctgccctgatttgtgcaacggtaacgggagatgcacactgggtcagaacagctggcagtgtgtctgccagaccggctggagagggcctggatgcaacgttgccatggaaacctcctgcgctgataacaaggataatgagggagatggcctggtggactgcctggaccctgactgctgcctacagtcagcctgtcagaacagcctgctctgccgggggtctcgggaccccttggacatcattcagcaaggtcagacagactggcctgcagtgaagtccttctatgaccgcatcaagctcttggcaggcaaggacagcacccacatcattcctggagacaaccccttcaatagcagcctggtgtctctgatccgaggccaagtagtaaccatggatgggactcccttggtgggtgtgaatgtgtcttttgtcaagtacccaaaatatggctacaccatcactcgccaggatggcacgtttgacctgattgccaatgggggttctgccttgactcttcactttgagcgagcccctttcatgagccaggagcgcacagtgtggctgccatggaacagcttctatgccatggacaccctggtaatgaagaccgaggaaaactccatccccagctgtgacctcagtggctttgtccggccagatccaatcatcatctcctctcctctgtccaccttcttcagcgcttcccctgcctcgaaccccattgtgcctgagacccaggttcttcatgaagaaattgagctccctggtaccaatgtgaagctccgttatctcagctctagaactgcagggtataagtcgctgctgaagatcaccatgacgcagtccacagtgcccttgaacctcatcagggttcacttgatggttgctgtagaggggcatctcttccagaagtcattccaggcttctcccaacctagcctacacattcatctgggacaagacagatgcttatggccaaagggtttatggcctatcggatgctgttgtgtctgttgggtttgaatatgagacctgccccagtctcatcctgtgggagaaaaggacagccctgcttcagggattcgagctggacccttccaaccttggaggctggtccctggacaaacaccacaccctcaatgtgaaaagcggaatactacacaaagggacaggggagaaccagttcctgacccagcagcctgccatcatcacgagcatcatgggcaacggtcgccgcagaagcatctcctgtcccagctgcaatggccttgctgaaggcaacaaactgttagcccctgtggccctggctgtggggatcgatgggagcctctttgttggtgacttcaactatatccggcgcatctttccctctcgaaatgtgaccagtatcttggagttacgaaataaagagtttaaacatagcaacagcccaggacacaagtactacttggctgtggaccccgtgactggctcactctacgtctctgacaccaacagtcgccgaatctaccgagtcaagtctctgagcggagccaaagacctggctggaaattcggaagttgtggcagggactggcgaacaatgtctaccctttgatgaagcccgctgtggggatggagggaaggctgtggacgccaccctgatgagccccagaggtattgcagtagacaagaatgggcttatgtactttgttgatgccaccatgatccggaaggtggaccaaaacggaatcatctccaccctgctgggctccaatgacctcacagctgtccgaccactgagctgtgactcgagcatggacgtggcccaggtccgtctagaatggccgacagacctcgccgtcaaccccatggacaactccctgtacgttctggagaacaacgtcatcctgcggatcacggagaaccaccaggtcagcatcatcgcgggacggcctatgcactgccaggttcccggcatcgactactcgctcagcaaactcgccatccactctgcgctggaatcagccagcgccattgccatttctcacactggggtgctctacatcactgagacggacgagaagaagatcaaccgcctacgccaagtcaccaccaatggagagatctgcctcttagccggggcggcctcagactgtgactgcaaaaacgatgtcaactgcatctgctactcgggagatgacgcttacgccacggacgccatcctgaactcgccgtcctccttagccgtggctccggatggcaccatctacattgcagaccttgggaatatccggatcagggcggtcagcaaaaataaacccgttcttaacgcattcaaccagtatgaggctgcatctccgggagaacaggaattgtacgtgttcaacgctgatggtatccatcagtacactgtgagtctggtgactggggagtacttgtacaatttcacatacagcgctgacaatgacgtcaccgagttgattgacaacaacgggaattccctaaagatccgccgggacagcagtggcatgccccgccacctgctcatgccggataatcagattatcacccttactgtgggcaccaatggaggcctcaaagccgtgtccactcagaacctggagctgggcctcatgacttatgatgggaacactggactcctagccaccaagagtgatgaaaccggatggacaactttttatgactatgaccacgagggccgtctgaccaatgtgacccgccccacgggcgtggtgaccagtctgcaccgggaaatggagaaatctatcaccattgacattgagaactccaaccgggatgatgacgtcactgtgatcaccaacctctcctccgtggaggcctcctatacagtggtacaagatcaagtgcgaaacagctaccagctctgcaataatggaaccctgcgggtgatgtacgccaacggcatggctgtcagcttccacagtgagccccacgtcctcgcaggcaccatcacccccaccatcgggcgctgcaacatctctctgcccatggagaatggcctgaactccatcgagtggcgcctgaggaaggaacagatcaaaggcaaagtcaccatctttgggaggaagcttcgggtccacggaaggaatctcctgtccattgattatgaccgaaatatccgtacggagaagatctacgatgaccaccggaaattcaccctgaggatcatctatgaccaggtgggccgccccttcctgtggctcccgagcagtgggctggcagccgtcaatgtctcctacttcttcaatgggcgcttggccggcctccagcgaggggccatgagcgagaggacagacattgacaagcaaggccggatcgtgtcccgcatgttcgccgacgggaaagtctggagttattcctatcttgacaagtccatggtccttctgctacagagccaacgtcagtacatatttgaatatgactcctccgatcgcctccacgcagtcactatgcccagtgtcgcccggcacagcatgtccacgcacacctccattggttacatccgaaacatttacaacccacccgaaagcaatgcatcggtcatctttgactacagtgatgacggccgcatcctaaagacatctttcttgggcactgggcgccaggtgttctacaagtatggaaaactctccaagttatcagagatagtctacgacagcacagccgtcacctttgggtatgacgagaccaccggtgtcctgaagatggtcaatctccaaagtgggggcttctcctgtaccatcaggtaccgaaaggttgggccccttgtggacaagcagatttacaggttctctgaggaaggaatgatcaacgccaggtttgattatacctatcacgacaatagcttccgcattgccagcatcaaacccgtcattagcgagactccccttcctgttgacctctaccgctatgacgagatttccggcaaggtggaacacttcggcaagtttggggtcatctactacgacatcaaccagatcatcaccactgccgtcatgacgcttagcaagcactttgacacccatgggcgcatcaaggaagtgcaatatgagatgttccggtccctcatgtactggatgactgtgcaatatgacagtatgggtagggtcatcaagagggaactgaaactagggccctatgccaacaccacaaagtacacctatgactatgacggggacggccagctccagagtgtggccgtcaatgaccggcctacctggcgctatagctatgacctcaatgggaacctgcaccttctaaacccaggaaacagtgctcgcctcatgcccttacgctatgacctccgtgaccggataaccaggctaggggacgtgcagtacaaaatcgatgacgatggctatttgtgccagagagggtcagacatctttgaatacaactccaagggccttctgacgagagcatacaacaaggccagcggatggagcgtgcagtaccgctatgacggagtgggccgccgggcttcctacaagaccaacctgggccaccacctacagtacttctactccgacctccacaaccccacacgtatcacccatgtttacaaccactccaactctgagatcacctcgctctactatgacctccagggccacctatttgccatggagagcagtagtggtgaagaatactatgtcgcctcagacaacacggggacccctctggctgtgtacagtatcaatggcctcatgatcaagcaactgcagtacacagcctatggggagatctactatgactccaatccagacttccagatggtcattggcttccacggaggcctctatgaccccctcaccaagctcgtccactttactcaacgtgattatgacgtgctggcaggacggtggacgtcccccgactacaccatgtggaggaacgtgggcaaggagccagcccccttcaacctgtacatgttcaagaacaacaatcctctgagcaatgagctggacttaaagaactacgtgacagacgtgaagagctggcttgtgatgtttggatttcagctcagcaacatcattcctggattcccgagagccaaaatgtattttgtgcctcccccctatgaactgtcagagagtcaagcaagcgagaacggacagctcattacaggtgtccagcagacaactgagaggcataaccaggccttcctggctctggaaggacaggtcatcactaaaaagctccatgccagcatccgagagaaagcaggccactggtttgctaccaccacacccatcatcggcaaaggcatcatgtttgccatcaaagaagggcgggtgaccacaggagtgtctagcatcgccagtgaggacagccgcaaggtagcatccgtgttgaacaatgcctactacttagacaagatgcactacagcatcgagggcaaggacacacactactttgtgaagatcggcgccgcggatggtgacctggtcacgctaggaaccaccattgggcgcaaggtgctggagagtggggtgaacgtgacggtgtcacagcccacgctgctggtgaatggcaggactcgaaggttcaccaacattgagttccagtactccacgctgctgctcagtatccgctacggcctcacccccgacacgctggacgaagaaaaggcccgcgtcctggaccaagcgggacagagagccctgggtactgcctgggccaaggagcagcagaaagccagggacgggagagagggcagccgcctgtggacggagggcgagaagcagcaactcctgagcacgggacgggtacaaggttatgagggctattacgtacttccggtggaacagtacccggagctggcagacagtagcagcaacatccagttcttaagacagaatgagatgggaaagaggtaacaaaataacctgctgccacctcttctctgggtggctcagcaggagcaactgtgacctcctctcctaaggagacgaagacctaacggggcactgaggccgggctgctttaggatcccaagtggcaagaaagctcacattttttgagttcaaatgctactgtctaagcgcaaagtccctcatcctgaagtagactagagcccggccacaaatttctgaggaaaaacaaaaactaaaggatgaacgaacgaacgaacgaatgaaaacacacacaaaatgtttcaagttcccctaaaatatgacccacttgttccgggtctaaggcagaaaagagacgcagaatagccaaaaggaaaggaacagaaaagaaacaaattaaaaaaaaaaaaaaaa

SEQ ID NO: 1172 - DNA, 405 bp, Mus musculus
tttttttttttatttttctctcctcgtggtgactgtcatgtgattgtctcagtttctggaccaaacaaacacactaataattttaagtctgaaacagtgattgcgccttacggcatatgtatgtacagggcgatcggaagtggtaaccgttagcaacagagtcacaaatgttgcatttctaccgcaactgatacccacaaactacggattctaaacagactacaccctgtaactgcgtattactgtccacaatggaatctccaaagacaaaaagattatgagatttatgtgtagtgagtatagccaccattttgaattaaaattttacactctgcgctcaaataaattagctcaggcctgactaagtgggggacctgagagttaagtgccagacggtattgtttc

SEQ ID NO: 1173 - DNA, 396 bp, Mus musculus
tttatggggaaagattcgttgtaatcattaatctggtttcagctaggagaattaactcttgagagatgatgcacacagcaggccttcggaaccggtgtgccagttactagggagaccacgcctccttcagaccacgcctccttcccgcagtttacatctttccggccttcttgcccatctgcgccggcactcggaggatgttgggggtctcctccatgactctgactagcaggttgtcgatgtagtcctccagctcccgcacctgaaactccttcttgctgatgggctccttctggttgagggacaagctggatcagttcattcgtgggtcagcttgcccgttggcaaaggcgggatccgagggctggtatttcttcatgagggcctcgctgatca

SEQ ID NO: 1174 - DNA, 1853 bp, Mus musculus
tagctccagcctctgcatcagctcctgctttcttacctgagttccagtcctgacttccttggtgatgaacaacaatgtggaagtcttcagtaacttgtgattggtggttggctatccagttgttcatcctcacatcaatgcactgccaatgggttatgtcctgtgttgtgacctcatggtttaagtgggaataaagatgagtataagcagtgatgaggtcaacttcttggtatataggtacttgcaagagtcaggattttctcattctgcgtttacctttggtatagagagccatataagtcagtccaacataaatggtgccctggttccacccgctgcactcatctctatcatccagaaaggcctgcagtatgtagaggcagaagttagcataaatgaggatggcaccttatttgatggtcgacccatcgagtctctgtccctgatagatgctgttatgcccgatgtagtccaaacaagacaacaagcctacagagacaagcttgcacagcagcatgcagccgcagccgctgccgctgctgccgccactaaccagcaaggatctgcaaaaaatggagagaatacagcaaatggggaggagaatggagcacataccatcgcaaataatcacactgacatgatggaagtagatggggatgtggaaatcccttccaataaagcggttgtgcttcggggccatgaatctgaagttttcatctgtgcctggaaccctgttagtgatctcctggtatcagggtctggagactccacggcaagaatctggaacctcagtgagaacagcacgagtggccctacgcagctcgtgcttagacactgcatacgggaaggagggcaggacgtgcccagtaacaaggatgtcacgtctctagattggaatagtgaaggtacacttctagcaactgggtcatatgatggatttgccagaatatggactaaagatggtaatcttgccagcaccttggggcagcataaaggtcctatatttgcattaaagtggaataagaaaggaaatttcatcctaagtgctggcgtagataagaccaccatcatttgggatgcgcatactggtgaagccaagcagcagtttcctttccattcagccccagcattggatgttgactggcagagcaacaacacctttgcatcttgtagtacagatatgtgcattcacgtctgcaaattaggacaagacagacctatcaaaacattccagggacacacgaatgaagtaaatgctatcaaatgggacccaactggcaatctcctagcctcctgttcagatgacatgacattgaagatctggagtatgaagcaagataactgtgtccatgatttgcaagcacataataaagaaatttatactattaagtggagtccaacaggaccagggacaaataatccaaatgccaaccttatgctagcaagtgcatcctttgattctacagttaggttatgggacgtagacagagggatttgcatccatactttgacaaaacatcaagagcccgtgtacagtgtggcttttagtcctgatggcaggtatctggcaagtggttcttttgacaagtgtgtgcacatctggaacacacagacaggtgctctagttcacagttacaggggaacaggtggaatttttgaagtttgctggaacgcagcaggagacaaagttggagccagtgcttcggacggttcagtttgtgtcttagaccttcggaaatagcgttactagttggaagccatggaccgactatgaatgtgtacatagccacaagactatccctgacccatatactgctatagtcccacttgaaccatggccagtccactacagc

SEQ ID NO: 1175 - DNA, 545 bp, Mus musculus
cgtctctcgggtggagtcttctgactgctggtggagcaggtctcaggaatctcttcgcttcagcttcaatcatggcctgtggtctggtcgccagcaacctgaatctcaaacctggggaatgtctcaaagttcggggagaggtggcctcggacgccaagagctttgtgctgaacctgggaaaagacagcaacaacctgtgcctacacttcaatcctcgcttcaatgcccatggagacgccaacaccattgtgtgtaacaccaaggaagatgggacctggggaaccgaacaccgggaacctgccttccccttccagcccgggagcatcacagaggtgtgcatcacctttgaccaggctgacctgaccatcaagctgccagacggacatgaattcaagttccccaaccgcctcaacatggaggccatcaactacatggcggcggatggagacttcaagattaagtgcgtggcctttgagtgaagccagccagcctgtagccctcaataaaggcagctgcctctgctccccatataaaaaaaaaaaaaa

SEQ ID NO: 1176 - DNA, 4437 bp, Mus musculus
cagcgggaagccgccaactagaaactcccttggattctccaagaggcgctggacctcgtttggtcccctttgccccagtgatccagctttaggagaagttttcccaagagaaggtaccagacagatcggatgtcaagaggcggctcaggtgttatagactgcaggcaatgattctaccttgataatccaggcagaccaccgtggatcaaaaattcctggtttctcccatttcctcagtgaacagaaagtattagagaccctttccagtctttgcacgttgcctcctttctgaggaatgatggaattgccattatgtggaagaggactgatcctaagtctaattttcctcctgttaaaattgtcagcagctgaaataccactctccgttcaacaggttccaacaattgtaaagcagtcatacgtgcaggtggcctttcccttcgatgagtattttcaaattgaatgtgaagcgaaaggaaaccctgaaccaatattttcatggactaaggacgataagccttttgatctttctgatcctcggataattgcggctaacaattcaggcacattcaagatcccaaatgagggccacatctctcactttcaaggaaaataccgctgtttcgcatccaatagactaggaactgcagtatcagaagaaatagagttcatagtaccaggggttccaaaattcccaaaagaaaaaattgaacccattgatgtagaagaaggggattccattgtcttaccctgcaaccctccaaaaggcctcccacctttgcacatctattggatgaatattgagttagaacacattgaacaagatgagagagtatacatgagccaaagaggagatctgtactttgcaaatgtggaagaaaatgacagtcggaatgattactgttgcttcgctgcatttccaaaattaagaacgattgtacagaaaatgccaatgaaactgactgtgaacagttcaaattccatcaagcaaaggaaacccaaacttctgttgcctcctgcccaaatgggaagtttatctgcaaagactgtactcaaaggggatacactattgctcgagtgttttgcggagggcctaccaactccacatatccagtggagcaaaccaggtagtgaattaccagagggaagagcaacaattgaagttcatgaaaagacattgaagatagaaaacatctcctaccaggatagaggaaattatcgctgtacagccaacaatttgttggggaaagccagtcatgattttcacgtcacagtagaagagcctccacgctggaaaaagaagcctcagagtgccgtgtacagcacggggagcagtggcatcttgttgtgtgaagcagaaggcgaacctcaacccacaatcaaatggagactcaatggcttgccgattgaaaaacatccatttcctggtgactttatgttccccagggaaatcagttttacaaacttactgccaaatcatactggtgtatatcagtgtgaagcctcaaatattcacggaaccattctggccaatgccaatattgacgttatagatgttatcccactgataaaaactaagaatgaagaaaactacgcgacagtggttggctacagcgctttcttacactgcgagtactttgcttctcccaaggccaccgtggtctgggaagtggctgatgagacacatcccctggaaggtgatcggtaccatacgcatgaaaacggcacactggagatctacagaactactgaggaggatgcggggtcctactcttgttgggtagacaatgccatgggaaaagccgtcatcacagcgaacttggatattagaaatgctacaaagctcagagtttctcctaagaatcctcgaatccctaaatcacatgtgcttgaactatactgcgaaagccagtgtgactcacatttgaaacacagtttgaagttgtcctggagtaaagatggagaagcttttgagatgaatggcacagaagatggcagaatagtgattgacggagcttacctgaccatatctaacatcacagcagaagatcagggtgtttactcctgttctgctcaaacttctcttgatagtacttcgaaaaaaactcaagtaaccgtccttggtgttggagatccgccagaaaccttcacttgtcagaaagacaaaaacagaagtgtccggctgcttcgggaagcaggagatgaccacaacagcaaatcagcgagtaccattgtagaatttgaagggaacagagaggagcctggaaagtgggaggagctaactagagtccagggagaagaaacagatgtcgtgttatctttggctccttatgtgagatatcagtttagggtcacagctgtaaacgaagtcggaagaagccacgccagcctgccttcagaccatcatgaaactccaccagcagctccagacaagaatccccagaacatcagagttcaagcatctcaacccaaggaaatgattataaaatgggagcctttgaaatccatggaacagaatgggccaggactggagtacaaagtgagctggaagccccagggagcccccgaagagtgggaagaagaaatagttacaaaccacacactacgtgtgatgacacctactgtctatgctccttatgatgtcaaggtccaagccatcaatcaactaggctccagccctgaccctcagccagtgacactctattcaggggaagactatcctagtacagcccctgtgatccagcgtgtggatgttatgaacagtacattagttaaagttacctggtcatccattcctaaggaaacagtacacggacttctaagagggtaccagataaattggtggaaaaccaaaagcctgttggatggaaggacacatcccaaagaagtaaacattctaaggttttcaggacagcgaaactctggaatggttccttccctagacccctttagtgaatttcacttaacagtcttagcctataactccaaaggagctggtccagagagcgagccttatatatttcagacaccagaaggagtacctgaacaaccaagttttctcaaggtcatcaaagttgataaagacactgccaccttatcctggggccttcctaagaaactaaatggaaatttaactggttatctcttacaataccagataataaatgacacctacgagcttggagagttaaatgaaatcaacgttactactccatctaaatccagctggcatctctccaacctcaactcaacaacaaaatacaaattctacctgagggcgtgcacctcaagaggctgtggaaagccaataagtgaagaaggtgccaccctaggagaagggagtaaaggtatcaggaagataacagaaggagtaaatgttacccaaaagattcaccctgtagaggtacttgtgccgggagcggaacatattgttcacctaatgactaagaattggggtgataacgatagcatttttcaagatgtaattgagacaagagggagagaatatgctggcttatatgatgacatctccactcaaggctggtttattggactgatgtgtgcaattgctcttcttacactgatattgttaactatttgctttgtgaagaggaacagaggtggaaagtattcagtaaaagaaaaggaagatttacacccagatccagaagttcagtcagcaaaagatgaaacttttggtgaatacagcgacagtgatgaaaaacctctcaagggaagccttcggtccctgaataggaacatgcagcccacagagagtgctgacagtttagtggaatatggagagggagaccagtccatattcaacgaagatggatcgtttattggcgcatacactggagctaaggagaagggatccgttgaaagcaatggaagttcaactgccaccttcccactccgggcatgagaacaacacattcaggcaccacgggtggctaagccggacaaggggagcaaggccttttacacaggagcggaaacgtgtccagaggttgatattctgcaattttgatgaagaatagcactgccttcaaagaaagggaaaaatcagatgccaagaacttcagactgtgttcatttggtttgattcaggtgctcaaaatgcagaacacgaaacaaatcctgtacttagatccactttgactgaatccaaagttcccatttcagatactccacatctacctggctctcctgttcagtgtgtgtgcattgatgttgctaagatgtgtgggtttctctctggatggcacaattatacttagttttgaagaactgttttagtgaattcgattcactacaggataaaagattgtaagcaagcaagctggttatttaaaatgtaaaaaggaacatgattgtcttattaaacatcccgtggaatctaaaaaaaaaaaaaaaaaaaaaaaaaaaaaaaaaaaa

SEQ ID NO: 1177 - DNA, 402 bp, Mus musculus
atgagtgtgcccactcaggtcctggggttgctgctgctgtggcttacagatgccagatgtgatatcgtgatgacccagtctccctcctccctgactgtgacagcaggagagaaggtcactatgcgctgcaagtccagtcagagtctgttaaacagtggaaatcaacagaactacttgacctggtaccagcagaaaccagggcagcctcctaaacttttgatctattgggcatccactagggaatctggggtccctgatcgcttcacaggcagtggatctggaacagatttcactctcaccatcagcagtgtgcagactgaagacctggcagtttattactgtcagaatgattatgattatccgctcacgttcggtgctggcaccaagctggagatcaaacgt

SEQ ID NO: 1178 - DNA, 7375 bp, Mus musculus
gacaagatgttgataaatatgaaaggcatcttatggatgtgctcaaccttattactaacccatgcactacatcaagccaaaatggaaaccagcccacctgttaaaggctctctgtctggaaaagtggtcctaccttgtcatttttcaaccttacctaccttaccacccaattacaacacgagtgaatttctcagaatcaaatggtctaagatggaagtggacaaaaatggaaaagatataaaggagacgactgtcttggtggcccagaacggaaatatcaagattggtcaggactacaaggggcgagtgtccgtgcctacacatcccgatgatgtaggtgatgcttccctcaccatggtcaaactccgggctagtgatgcagccgtctaccgatgtgatgtcatgtatgggattgaagacactcaggacaccatgtcactggctgtggatggtgttgtgtttcactacagggcagccaccagcaggtacactctgaactttgccgctgctcaacaggcttgtttggatatcggggcggtcatagcaagcccagagcagctgtttgccgcctatgaggatggatttgagcagtgtgatgcaggatggctgtctgatcaaactgtcagatatcccatacgggctccccgagagggctgttacggagacatgatggggaaggaaggggttcggacctatggattccgctctccccaggaaacctatgatgtgtattgttatgtggatcatctggatggcgatgtgttccacatcactgctcccagtaagttcaccttcgaggaggccgaagcagagtgtacaagcagggatgcgaggctggcgactgttggagaacttcaggcagcttggagaaatggctttgaccaatgcgattacggctggctgtcggatgccagcgtgcggcaccctgtgactgtggccagggcccagtgtggaggaggtctacttggggtgagaaccctgtatcgttttgagaaccagacatgcttccctctccctgatagcagatttgatgcctactgctttaaacgtcgattgagtgatatgattgtaagtggtcatccaatagattcagaatctaaagaagaggaaccttgcagtgaagaaacagatccactgcatgatctgtttgctgaaattttacccgagttaccagactcatttgaaatagacatatatcacagtgaggaagatgaagacggagaggaggactgtgtaaatgcaacggatgtaacaactactccgtcagtgcagtatatcaatgggaagcagctcgttaccacagtgcctaaggacccggaagctgcagaagctaggcgtggccagtacgaaagtgttgcaccttctcagaatttcccagatagttctgcaactgacacccatcagtttatactagcagaaacagaatcgtcaactaccatgcaatttaagaaatctaaagaaggcacggaattgttagaaatcacatggaaacccgagacctaccctgaaacaccagaccatgtttcaagtggtgagcctgatgttttccctactctctcatcccatgatggtaaaaccaccagatggtcagagtccatcacagagagcagtccaaaccttgaaaatccagtgcacaaacaacctaagcctgtccctctgtttcctgaagagtcttcaggagagggtgccattgaacaagcatcccaggaaacaatcttatctagggctacagaagtagcacttggtaaagagacagaccaaagtcctaccttatctacctctagcatactttcaagttctgtgtcagtaaatgtcttggaggaagaaccacttactctaacaggaatctcacagactgatgaatccatgtctactatagaaagctgggtagagataacacctagccaaactgtaaagttctcggagagttcttcagctcctatcattgaagggtctggggaagtagaagaaaataaaaataaaatctttaacatggtaactgatttaccacagagagatcctacagatacactcagccctttggatatgagcaagataatgatcacaaaccatcacatttatattcctgcaaccatcgctcctttggattcaaaactaccttctccagatgcaaggcctacgacagtttggaattcaaacagcacctctgagtgggtttccgataagtcttttgaaggaagaaaaaaaaaagagaacgaagatgaagagggagctgtgaatgcagcccaccaaggagaagttcgagcagcaacagagaggtcagatcacttacttttaacaccagaattagaaagttcaaatgtagatgcatctagtgatttggctacctgggaaggttttattctagagacaacacccacagagtctgaaaaggaaatggcaaattcaactcctgtttttagagaaacaattggtgtagccaatgtggaggcacagccctttgagcatagcagtagtagtcatcccagggttcaggaagagctgaccactctctcaggaaatcccccctctctttttacggacctgggctcaggagatgctagtactggtatggaactcatcactgcttctttatttacattagatttagagtctgaaaccaaagtcaaaaaggaattacccagtactccgtctcccagtgtggagatatcatcctcttttgagccaacaggattaaccccgagtactgtactagacatagaaattgctggagttatgagccagacatcgcagaagacactgatttctgaaatatcaggaaagccaacttcccagtcaggagtaagggatttgtatacaggctttccaatgggagaagattttagtggtgacttcagtgaatatccaacagtgtcttatccaacgatgaaagaggaaacagttgggatgggaggttctgacgacgaacgagttagggatacacagacttcatcatctataccgactacctcagacaacatctaccccgtgcctgactcaaaaggacctgacagtactgtggccagcaccacagccttcccctgggaagaggtcatgtcctcagctgaggggtcaggtgagcaattagcctcagtcaggagctctgttggtccagtgcttccactagctgtggacattttttctggaacagagtctccatattttgatgaagagtttgaagaagtggctgcagtgacagaagcaaatgaaagacccactgttttgccaacagcagcaagtggaaatactgtagatcttacagaaaatgggtacatagaggtaaatagcacgatgtcactggactttccccagacaatggagccatccaaattgtggtctaaaccagaagtcaatcttgataaacaagagatcggaagagaaacagtgacaaaggaaaaagctcagggacaaaagacttttgaatcgctccacagttcttttgcaccagaacaaaccattttggaaacccaatcacttattgaaactgaattccaaacttccgattactctatgttaacaacactgaaaacgtacattactaataaggaagtggaggaggaaggtatgtccatagcgcatatgtctactccaggtccagggatcaaagacttggaatcatatactacccatcccgaagctcctggaaagtcacactctttctcagctactgctttagtgactgaatctggagcagctagaagtgtactcatggattcctcaactcaagaggaagaaagcataaaactcttccaaaagggtgtgaaactaacaaataaagagtcaaatgctgatctctcattctctggactgggatcaggaggggctttgcctcctctacctacaacatcagtgaatttgactgacatgaagcagatcattagcacattgtatgctgagacatctcacatggaaagcttaggaacaagcatcttaggtgataaaatggaagaccatgaaagaatggaagatgtgtcgtccaatgaagttagaatgctcatttccaaaataggcagcatctctcaagacagcacagaggcactcgacacaactttgagtcataccggaacagaagaacctacaacttcaactcttcctttcgtgaagctcatggacttggaacgttctccaaagcaagacccctcaggtgggaagaggaaacccaagacccatagaccacaaactatgagtggactgatctctaatgaaaattcttcagcatcagaagctgaagaaggagcaacttcccccactgcttttctccctcaaacttacagtgttgaaatgaccaaacactttgctccatcagagtcacaaccatccgacttgtttaatgtaaactctggagagggatctggagaagtggatactcttgacttagtgtacacttctggaactactcaggcaagcagtcaaggagacagcatgcttgcttctcatggatttctggaaaaacatccagaggtgtcaaagactgaggctggagctactgatgtatctccaacagcctcagcaatgttcctgcatcactcagagtacaagagttctctgtatccaaccagcacactgccaagcacagagccatataaaagtccctcagaaggtattgaagatggtttgcaagacaatatccaatttgaaggttctaccttgaaacctagcagaagaaaaaccactgaaagcattattatagatctagacaaagaggatagtaaggacctaggattgacaattactgagagtgctattgtgaaatctctccctgagctgacatcagataaaaatattattatagacattgatcacactaaacctgtatatgagtacatccctggaatacaaacagacctagatccagagataaaattggaatcacatggcagtagtgaagaaagccttcaagttcaagagaagtatgagggagctgttaccctttctccaactgaggaatcatttgaaggctctggtgatgcgcttcttgctggctatactcaagcaatatacaatgagtctgtgactcccaacgatggaaagcaggcagaggacataagctttagttttgccactgggatcccagtttctagcacagagacagaattacacactttcttccccacagcgtcaaccctgcacattcctagtaaactaaccacagctagtccggagattgataaacccaacattgaagcaatatctctggatgatatatttgaatcaagcaccttgtctgatggccaagctattgcagaccagagtgaagtaatatcaacattagggcatttggaaaaaacacaggaagaatatgaagaaaagaaatatggaggtccttcatttcagccagaattcttttcaggagtgggggaagtattgacagatccccctgcttatgtaagtattggtagtacataccttatagctcagactttaacagaattacccaatgtggtaagaccatctgactccacacattacactgaagcaacacctgaagtttcctctctggcagagctctctccacagataccatcttctcccttccctgtctacgtagacaatggagtctctaaattcccagaggttccccatacaagtgctcagccagtttctactgtcacctcatcacaaaagtctatagagagtccttttaaggaagtccatgctaatattgaagaaaccatcaagccattgggtggaaatgtccacagaacagagcctccatccatgtctcgtgaccctgctttagatgtttcagaagatgaaagtaagcataagttactagaagaactggaaacgtctcccaccaaacctgagacttcccaagacttcccaaacaaagcaaaggatcacattccaggagaaacagttgggatgcttgctggtatcagaacaacagagagcgaacctgtcattactgcagacgacatggagctaggaggtgccacacagcagccacattctgcttctgcagctttcagagttgagacaggtatggtacctcagcccatccaacaggagcctgagaggccaacctttccttccttggaaattaaccatgaaacacacacatcattatttggagaatctatactggcaacatctgaaaaacaagtgtctcaaaaaattcttgataatagtaaccaggcaacagtcagtagtactctggatctacatactgcacatgcattatcaccattttccattctggacaattctaatgaaactgctttcctgattggcattagtgaagagtccgtggaaggcacagcagtttacctaccaggacctgatctctgcaaaacaaacccatgcctcaacggaggcacctgttatcctaccgagacttcctatgtgtgcacctgtgcacctggatacagcggagaccagtgtgaacttgattttgatgaatgtcactctaacccttgtcggaatggtgccacctgtgtggatggttttaatacatttagatgtctctgtctcccaagttatgttggtgcactctgtgaacaagacactgagacatgtgactatggctggcacaaattccaaggacagtgctacaagtactttgctcatcgacgcacatgggatgctgctgaaagggagtgtcgcctgcagggtgcccacctcacaagcatcctttctcatgaggaacaaatgtttgtgaatcgtgtgggccatgattaccagtggatcggcctcaatgacaagatgtttgaacatgacttccgctggactgacggcagtgcactgcaatatgagaactggagacccaaccagccagacagtttcttttctgcaggagaagactgcgttgtgatcatttggcatgaaaatggtcagtggaatgacgtcccctgcaattaccacctcacctacacttgcaagaagggaacagttgcttgcggccaaccccctgttgtagaaaatgccaagacctttggaaagatgaaaccacgctatgaaatcaactccttgattagatatcactgcaaagatggtttcattcagcgacaccttccaactatccggtgcctaggaaacgggagatgggcaatgcctaaaataacctgcatgaacccatctgcataccaaaggacttattctaagaaatacttaaaaaattcctcatccgcaaaggacaattctataaatacatcaaaacatgagcatcgctggagccggcggcaggaaaccaggcgctgatccttaaaatggcgaacatgtgcttcactcatcatttcagccaaagtcctgcctttccgtgcctttcctatcacctcaagaagaattagaagttggtttggattatgggactgccgtctggtcatttggggtggctgtactcttaaaatattttcaatgaaacatggaattttga

SEQ ID NO: 1179 - DNA, 3054 bp, Mus musculus
agctccgcgggagaggtgcgggccagaggagacagagcctaacgcagaggaagggacctggcagtcgggagctgactccagccggcgaaacctacagccctcgctcgagagagcagcgagctgggcaggagcctgggacagcaaagcgcagagcaatcagcagagccggcccggagctccgtgcaaccggcaactcggatccacgaagcccaccgagctcccgccgccggtctgggcagcatgagacgcgcggcgctctggctctggctctgcgcgctggcgctgcgcctgcagcctgccctcccgcaaattgtggctgtaaatgttcctcctgaagatcaggatggctctggggatgactctgacaacttctctggctctggcacaggtgctttgccagatactttgtcacggcagacaccttccacttggaaggacgtgtggctgttgacagccacgcccacagctccagagcccaccagcagcaacaccgagactgcttttacctctgtcctgccagccggagagaagcccgaggagggagagcctgtgctccatgtagaagcagagcctggcttcactgctcgggacaaggaaaaggaggtcaccaccaggcccagggagaccgtgcagctccccatcacccaacgggcctcaacagtcagagtcaccacagcccaggcagctgtcacatctcatccgcacgggggcatgcaacctggcctccatgagacctcggctcccacagcacctggtcaacctgaccatcagcctccacgtgtggagggtggcggcacttctgtcatcaaagaggttgtcgaggatggaactgccaatcagcttcccgcaggagagggctctggagaacaagacttcacctttgaaacatctggggagaacacagctgtggctgccgtagagcccggcctgcggaatcagcccccggtggacgaaggagccacaggtgcttctcagagccttttggacaggaaggaagtgctgggaggtgtcattgccggaggcctagtgggcctcatctttgctgtgtgcctggtggctttcatgctgtaccggatgaagaagaaggacgaaggcagctactccttggaggagcccaaacaagccaatggcggtgcctaccagaaacccaccaagcaggaggagttctacgcctgatggggaaatagttctttctccccccacagcccctgccactcactaggctcccacttgcctcttctgtgaaaaacttcaagccctggcctccccaccactgggtcatgtcctctgcacccaggcccttccagctgttcctgcccgagcggtcccagggtgtgctgggaactgattcccctcctttgacttctgcctagaagcttgggtgcaaagggtttcttgcatctgatctttctaccacaaccacacctgttgtccactcttctgacttggtttctccaaatgggaggagacccagctctggacagaaaggggacccgactctttggacctagatggcctattgcggctggaggatcctgaggacaggagaggggcttcggctgaccagccatagcacttacccatagagaccgctaggttggccgtgctgtggtgggggatggaggcctgagctccttggaatccacttttcattgtggggaggtctactttagacaacttggttttgcacatattttctctaatttctctgttcagagccccagcagaccttattactggggtaaggcaagtctgttgactggtgtccctcacctcgcttccctaatctacattcaggagaccgaatcgggggttaataagactttttttgttttttgtttttgtttttaacctagaagaaccaaatctggacggcaaaacgtaggcttagtttgtgtgttgtctctgagtttgtcgctcatgcgtacaacagggtatggactatctgtatggtgccccatttttggcggcccgtaagtaggctggctagtccaggatactgtggaatagccacctcttgaccagtcatgcctgtgtgcatggactcagggccacggccttggcctgggccaccgtgacattggaagagcctgtgtgagaacttactcgaagttcacagtctaggagtggaggggaggagactgtagagttttgggggaggggtggcaagggtgcccaagcgtctcccacctttggtaccatctctagtcatccttcctcccggaagttgacaagacacatcttgagtatggctggcactggttcctccatcaagaaccaagttcaccttcagctcctgtggccccgcccccaggctggagtcagaaatgtttcccaaagagtgagtcttttgcttttggcaaaacgctacttaatccaatgggttctgtacagtagattttgcagatgtaataaactttaatataaaggagtcctatgaactctactgcttctgcttcttcttctctggactggtggtatagatatagccaccctttgcccaaaccctggtagctcggggaagcttggcttaaggctgcacgcctccaatcccccaaaggtaggatcctggctgggtccagggttcctctgatttatttggttttgttgtgttgtgttgtgtttttcttttggctaaacttcttttggaagttggtaagttcagccaaggttttacaggccctgatgtctgttcttctaaatggtttaagtaattgggactctagcacatcttgacctagggtcactagagctaagcttgctttgcagggcagacacctgggacagccttcctccctcatgtttgctgggacactgctgagcaccccttgcttacttagctcagtgatgttccagctcctggctaggctgctcagccactcagctagacaaaagatctgtgccctgtgtttcatcccagagcttgttgccagatcacatggctggatgtgatgtggggtgggggtggggtcatatctgagacagccctcagctgagggcttgtgggacagtgtcaagcctcaggctggcgctcattcatataattgcaataaa

SEQ ID NO: 1180 - DNA, 294 bp, Mus musculus
tttctcggaccaagtttcaagggggagaaggagattttaaaaccacaggcctttcaaaacagttagataaaaatgccaatgtctaaagatatttggcaagcttccttcctgagttttgttgtgcaagagaactttcttcacaatattccttccaaggttttcctgtaattattgcttaagctgttttttataaatataaatttgaagactgttaattggatgtaaattttcttatagttatatactattcattttttgttatccctttttgtaagggaaataaacagattattt

SEQ ID NO: 1181 - DNA, 3004 bp, Mus musculus
atggctccctcgccgctcgcgtggctgctgcgcctggccgcgttcttccatttgtgtactctgctgccgggtcagcacctcggcatgacgaaatgcgaaatcatgtgcggcaagatgacctcacgaatcccagtggctttgctcatccgctatcagctaaatcaggagtcctgcggcaagcgtgccattgtcctggagacgacacagcacagacgcttctgtgctgacccgaaggagaaatgggtccaagacgccatgaagcatctggatcaccaggctgctgccctcactaaaaatggtggcaagtttgagaagcgggtggacaatgtgacacctgggatcaccttggccactaggggactgtccccatctgccctgacaaagcctgaatccgccacattggaagaccttgctttggaactgactactatttcccaggaggccagggggaccatggggacttcccaagagccaccggcagcagtgaccggatcatctctctcaacttccgaggcacaggatgcagggcttacggctaagcctcagagcattggaagttttgaggcggctgacatctccaccaccgtttggccgagtcctgctgtctaccaatctggatctagctcctgggctgaggaaaaagctactgagtccccctccactacagccccatctcctcaggtgtccactacttcaccttcaaccccagaggaaaatgttgggtccgaaggccaacccccatgggtccagggacaggacctcagtccagagaagtctctagggtctgaggagataaacccagttcatactgataatttccaggagagggggcctggcaacacagtccacccctcagtggctcccatctcctctgaagagacccccagcccagagctggtggcctcgggcagccaggctcctaagatagaggaacccatccatgccactgcagatccccagaaactgagtgtgcttatcactcctgtccccgacacccaggcagccacaaggaggcaggcagtggggctactggctttccttggtcttcttttctgcctaggggtggccatgtttgcttaccagagccttcagggctgtccccgcaaaatggcgggggaaatggtagaaggcctccgctacgtcccccgtagctgtggcagtaactcatacgtcctggtgccagtgtgagctgcttgcctgcctgcctgtgtccagagtgtgattcggacagctgtctggggacccccccccatcctcatacccaccttcatccacgctggggaaatgggaatggagaagctggacctccaggggctgtgggctccatccaatcccccttcccccgaggggtggccccggaggccaccctagaccactattcacttatcagagacagagcaggtgaccttccagctcctctatatttgaaagaatcctctgctgctggctggttagaggggcccttgacaccccaactccagtgaacaattatttattggattcccagcccctgcgacgacacctgtttcccgcgcgcaccgtggtccgcccatatcacaagcagcaggccaggcctatctgcctgtccccctgacctccttgtgtctcctggctttgctgcagtcgccagcccttctcctccccggccagccgcggtgctatctgccctatgtctccctctatcccctgtacagagcgcaccaccatcaccatcaacaccgctgttgtgtcttttcttgcatgaggttaaagctgtgttttctggagctctccgggaagggagacaagcttgcgagagggtttaaagtgttcctccccagacttggatgtgctgtgagggcatgctgcgtctgaaggaagggtccagtccccactcggctaccagcaccacaaagtgccccacctgtaaaaggaaagaaacgtggtccagagctggcaataacctatggccctgacatcatcactttctctgagatccttgtctccacccctgggtgcaaccccaccccttatcaacattaatagtcactgccattccactggactgacatttttgtaccctgtgattctgagggctggcaaggagtggcttgagagtgcagatcgtaccctgtatgccccccccaaatggaggctgagttggggacttgcaggaacagaggccaactcagatggcttcccctgtgttctcactagaaacccctcccccatgcaccaaggtgacagtcacaggtctgccctggctaaaggacaagccacataggaaagattaggacaagcccctcggaggcagaggatccagggtaaacccctggagtggccacaaacccaatttcagtgtagggacttgtgcatgtgtgtacttgcatagtcagacagaggctgccagggtcctttcctgtctctgagagcagtgttcacgccaaggactcacctttgcccccattgcaggcagggccagaactcccatagcattctccaagagccctgtgacattttctggaaggaactctgccctgggcgcaaagtgactgctgaagcaaggagcagctgagcagcaccccagcggagctgagccggcaggccacgcccctcgggggggggcatttctacccgccctgctctgaatagctccaacttcaccttaggagcctcccaggggcgagcttcacccagaagccagtgactcactccttgattggtggaagctcagttggctcctgagagtgaggaagccaaccctttgtcgaccctcctcctgggaagcctgtgggcggctctgatcatgctccacagaaccagttgtaggcctgagccgcagcagcccgagtgcactatatcctggctccttcggtggggaacctttaagggttgggacacccgtcatcggactttgttggttcctccctcccagagcagaatgtgggccgtaacaatctgaggaggactttaaaagttgttgatcctttagggttttttttcaagcatcattaccaatgtctgt

SEQ ID NO: 1182 - DNA, 2674 bp, Mus musculus
ggcacgagcctgctttcatcgtgggtccgcgcgtgctccagctccatggcgctcctcatgcgactgctgaccctcgctctggcactgtctgtgggccccgctgggacccttgcaggtcccgccaagtcaccctaccagctggtgctgcagcatagccggctccggggtcgccagcacggccccaatgtatgtgctgtgcagaaggtcattggcaccaacaagaaatacttcaccaactgcaagcagtggtaccagaggaagatctgcggcaagtcgacagtcatcagttatgagtgctgtcctggatatgaaaaggtcccaggagagaaaggttgcccagcagctcttccgctctcaaatctgtatgagaccatgggagttgtgggatcgaccaccacacagctgtatacagaccgcacagaaaagctgaggcctgagatggagggacccggaagcttcaccatctttgctcctagcaatgaggcctggtcttccttgcctgcggaagtgctggactccctggtgagcaacgtcaacatcgaactgctcaatgctctccgctaccacatggtggacaggcgggtcctgaccgatgagctcaagcacggcatgaccctcacctccatgtaccagaattccaacatccagatccatcactatcccaatgggattgtaactgttaactgtgcccggctgctgaaggctgaccaccatgcgaccaacggcgtggtgcatctcattgacaaggtcatttccaccatcaccaacaacatccagcagatcattgaaatcgaggacacctttgagacacttcgggccgccgtggctgcatcaggactcaataccgtgctggagggcgacggccagttcacactcttggccccaaccaacgaggcctttgagaagatccctgccgagaccttgaaccgcatcctgggtgacccagaggcactgagagacctgctaaacaaccacatcctgaagtcagccatgtgtgctgaggccattgtagctggaatgtccatggagaccctggggggcaccacactggaggtgggctgcagtggggacaagctcaccatcaacgggaaggctgtcatctccaacaaagacatcctggccaccaacggtgtcattcatttcattgatgagctgcttatcccagattcagccaagacactgcttgagctggctggggaatctgacgtctccactgccattgacatcctcaaacaagctggcctcgatactcatctctctgggaaagaacagttgaccttcctggcccccctgaattctgtgttcaaagatggtgtccctcgcatcgacgcccagatgaagactttgcttctgaaccacatggtcaaagaacagttggcctccaagtatctgtactctggacagacactggacacgctgggtggcaaaaagctgcgagtctttgtttatcgaaatagcctctgcattgaaaacagctgcattgctgcccatgataagaggggacggtttgggaccctgttcaccatggaccggatgttgacacccccaatggggacagttatggatgtcctgaagggagacaatcgttttagcatgctggtggccgccatccagtctgcaggactcatggagatcctcaaccgggaaggggtctacactgtttttgctcccaccaatgaagcgttccaagccatgcctccagaagaactgaacaaactcttggcaaatgccaaggaacttaccaacatcctgaagtaccacattggtgatgaaatcctggttagcggaggcatcggggccctggtgcggctgaagtctctccaaggggacaaactggaagtcagctcgaaaaacaatgtagtgagtgtcaataaggagcctgttgccgaaaccgacatcatggccacaaacggtgtggtctatgccatcaacactgttctgcagccgccagccaaccgaccacaagaacgaggagatgagctggcagactctgcccttgaaatcttcaaacaggcgtcagcgtattccagggctgcccagaggtctgtgcgacttgcccctgtctatcagcggttactggagaggatgaagcattagcaggaagaccgaggaggagagccctgcagcagcttcccgccagtttctctcagtttgccaaagagaccattgaatgtttttgaaaccaaagagcacacttcaacatacatgggcgcaccatattgagatctgagccttggacgggtagggaaggggttaaggggagaaaggttctttttagctttgatccctccaaaccgtggttgttaacccattcgaatatacagatctggcagtcatagcttggcaccaaattcccgaaagacctctcgaaagcatgaatttcctgactgtgccaaggcctgataaagggaactacggcatcttggagctcacaaatgtgaatcaagcagtccggcattctggaaagccttggcatggttctgtaaagctcttgtaccgctggagaaacggcatcactataagctatgagttgaactgtttctgtcaagtatgtcttgtgtccacacatggtttggatgcttctatattggccctgcccaggtagaaagggtaagaagaacatgtagaatccagattccctgagtgtgagggacccatggtgcatttgtaataa

SEQ ID NO: 1183 - DNA, 206 bp, Mus musculus
gggcagactctctcacgaaacacctcccccataggaagagcagacccagactcattctggattcagtttttccgttgatccattcctcccttttagtttcctgagcctggcttggaccttggcattccgtttgaattcttttttttaattggaacatttctgttgtatctgtaacactggcactgaaataaagaccacacggttaa

SEQ ID NO: 1184 - DNA, 2905 bp, Mus musculus
cgcagtcgcctcctcctcggcaaatagtcctcggcgggggccgagtcctcgggtcatccggggtgggagacggcacgggctgcagtcggagggacgcggggcggccggcgagagggagccggggagcggcgtctcccggggaagcgcgaggcgtgaggtagaggcgccctcctcgcccgggatccctccgcctgcagtcgcggtgctgaggccgagggagccgccattttggatgttcggttcctgctgccactgccgccgccgcccccgaagctgctggtttccttcgaggtttcgggccgaggatgccagcccccatcagattgcgggagctgatccggaccatccggacagcccgaacccaagctgaggaacgagaaatgatccagaaagaatgtgctgcaatccggtcctcatttagagaagaagacaatacataccggtgtcggaatgtggcaaagttactatatatgcacatgctgggctaccctgctcactttggacagttggagtgcctcaagctaatcgcctcacaaaaattcacagacaaacgcattggctatttaggagcaatgctattattagatgaaagacaagatgtgcatcttctcatgaccaactgtatcaagaatgatcttaatcatagcacgcagtttgtgcaggggctagcactttgtaccctcggctgcatgggctcctcggagatgtgcagagatcttgcgggagaggtagaaaagcttctgaaaacctccaactcttacttaagaaaaaaggcagcactgtgtgctgttcacgtcatcaggaaggttcctgaacttatggagatgtttttaccagcaacaaaaaatttattgaatgagaagaaccatggtgtccttcacacgtctgtagtcctcctcacagagatgtgtgaacggagcccagacatgctcgcacatttcagaaagcttgtgccccaattagttcgtattctaaagaacctcatcatgtccggatattccccagaacatgatgtctctggtatcagtgacccctttttgcaggtacgaattttgcggttattaagaattttaggacggaatgacgatgattcaagtgaagctatgaatgatatattagcacaggttgccactaatacagagactagtaaaaatgtaggaaatgctattctgtatgagacggttttgactatcatggatattaaatcagagagtggattgcgagttctagccataaatattcttggtcgattcttattgaacaatgacaaaaatattagatatgttgctctgacatctctgttgaagactgtgcagacagatcataacgctgtacagaggcatagaagcacaattgtggactgtctgaaagatctggatgtctccataaaaagacgtgcaatggaactgagttttgccctggtgaatgggaataatatccgaggcatgatgaaagaattactttattttctggattcctgtgagccagaatttaaagctgattgtgcatctggaatcttccttgctgcagaaaagtacgcaccttccaaacggtggcatatagatacaattatgcgtgtcttgacaacggcaggaagttatgttcgcgatgatgcagttcctaacttgattcagttaataaccaacagtgtggagatgcacgcttacaccgtccagcgcctgtacaaggcgattctcggtgactattctcaacaacccttggtacaagtggctgcgtggtgtataggtgaatatggcgatcttcttgtgtctggccagtgtgaagaggaagagcctattcaggtgacagaagatgaagtgctggatattttagaaagtgtcctgatctctaatatgtccacctctgtgacaagaggctatgctctcactgccattatgaagctgtctacccgattcacctgtactgtaaaccgaattaagaaagtggtttccatctatgggagcagcatcgacgtagagctccagcagagggcagtagagtacaacgcactttttaagaagtatgaccacatgaggtctgccctacttgaaagaatgcctgtcatggaaaaagtgaccacaaatggcccttcggagatcgtgcagacaaatggagagacagaaccagcgcccctagagactaaaccaccaccctcagggccacaacccacaagccaggccaatgatctattggatttgttgggaggaaatgacataacacctgttatcccaactgcacctacaagcaaaccagcatcagctggtggagaacttctcgacttgctaggagacatcaccctgacaggtgctccagctgctgctcctacccctgcctcagtgccacagatatcccagccccccttcttgttggatgggctttcctcacagcctctcttcaatgacatcgctccaggcatcccctccatcacagcgtacagtaagaacggcttgaagatagagttcacctttgaacggtcaaacaccaaccccagcgtaacagtgataacgatacaggcctctaacagcacagagctagacatgacggactttgttttccaggctgcagtaccaaagacattccagctgcagcttctgtctcctagcagcagcgttgtcccagcctttaatacagggaccatcacacaagtcattaaagttctgaatccacagaagcaacagctgcgaatgcggatcaagctcacatataatcacaagggctcggcaatgcaagatctagcagaagtgaacaatttcccccctcagtcctggcaatgaggatgcagcaccattctcattcttatcccactcaatcaaaggaattctgggaaggaggttgtgattgctggcaagtccccccaactgtaccatgggcacgaggagctgagagaactgttgaggagggtttg

SEQ ID NO: 1185 - DNA, 1348 bp, Mus musculus
cggttcactagaggagggaagaagtctacaaggacccatcaatttcctgcctgcctgcagcaaggacagacggcatgagcactgcgggaaaagtgatcaaatgcaaagctgcggtgctatgggagcttcacaaacccttcaccatcgaggacatagaagtcgcaccccccaaggcccatgaagttcgaattaagatggtggccactggtgtctgccgctcagacgatcacgtggttagtggaaccctggtcacacctcttcctgcagttttaggccatgagggagcaggcattgttgagagcgttggagaaggggtgacttgtgtgaaaccaggtgataaagtcattccactcttttcccctcagtgtggagaatgcaggatttgcaagcacccggaaagcaacttttgtagccgaagcgatctgctaatgcctcgggggactttgcgcgaaggcaccagcaggttctcctgcaagggaaagcagatccacaactttatcagcaccagcaccttctcccagtacaccgtggtagatgatatagcagtggccaaaatcgatggagcttcaccactggacaaagtctgcctcatcggctgtgggttctcaactggctatggctctgccgtcaaagtcgccaaggtgaccccaggctccacatgtgccgtgtttggcctcggaggtgtcggtctgtctgtcatcattggctgtaaagcagcaggagcagccaggatcattgctgtggacatcaacaaggacaagtttgccaaggccaaagagttgggtgcaactgagtgcatcaaccctcaagactacagcaaacccatccaggaagttctccaggagatgaccgacggaggggtggacttttcgtttgaagtcatcggccgccttgacaccatgacttctgccctgctgagctgccatgcagcatgtggtgtaagcgtcgtcgtaggagtgcctcccaatgcccagaacctctccatgaaccccatgttgctgctgctgggacgcacctggaagggagcaatatttggcgggtttaagagtaaagattctgtccctaaacttgtggctgacttcatggctaagaagtttccgttggacccgttaattacccatgttttacctttcgagaaaataaatgaagcatttgacctgcttcgttctggaaagagcatccgtaccgtcctgactttctgagatcatgtggatgccttcccacgcaccagtttctgaaccctaaaccagactgattcaagcaccagccacatcacagccttaatctttgctctttagagacacagccaataaagtacttgtgtaagctctccaaaaaaaaaaaaaaa

SEQ ID NO: 1186 - DNA, 2029 bp, Mus musculus
tttgattcctcgagcactgttggcctactggagttacctgaccacagggcaggatcctcttacctttgtccttgctaagcagtaatgactgatcaactattgacaggagacaatggcaaagaaggttgtggtgattggagcaggggtcagtggcctaatctctctgaagtgctgcgtggacgagggtctggagcccacctgcttcgaaaggactgaagatatagggggactgtggagattcaaagaaaacgtggaagatggccgcgctagcatctaccgctctgtcattaccaacactagcaaagaaatgtcctgtttcagtgacttcccgatgccggaggacttccccaacttcctgcacaactctaaactcctggaatattttaggatctttgccaagaaatttgatctcctaaaatatattcagtttcagaccactgtcattagtgtgaaaaaacgcccggacttcgcatcttctgggcaatgggaagtttatactcagagcaacggaaaggagcaacgcactgtctttgacgctgttatggtttgcagcggccatcacatccagcctcacctgccactcaagtcattcccaggtattgagaggttccgaggccggtatttccatagccgcgaatacaagcacccagtggggtttgaggggaaacgcatcctggtggttggaataggaaactcagctgcagatattgcctctgaactgagtaagacggccgcgcaggtgtttgtcagcaccagacatggatcctgggtcatgagtcgaatctctgaagatggctacccttgggacatggtgttccacactagatttagctccatgctccgaaatgtcctgccccgcacggtcgtcaagtggatgatggaacaacagatgaatcgatggttcaaccatgaaaattatggtctggtgcctcagaacaaataccttatgaaagaacctgtgctaaacgacgacctccccagccgcctgctgtacggagccatcaaagtaaaaacacgggtgaaggagctcacggagacagctgtggtcttcgaggatggcacggtggaggaagacgtggatatcattgtctttgccacggggtatacgttctctttttctttcctggaagactcacttgttaaagtggaggataatagggtttccctgtacaaagccatgtttccccctcacctggagaagccaacccttgcgtgcataggtctcatccagcctctaggctccatcttcccaaccgtagagcttcaggcgcgctgggcgacaagagttttcaaaggcttgtgtagcttgccttcggagacgactatgatggcagacattgttgaaagaaatgaaaaaagagttaacctgtttgggaaaagccagagtcagatactgcagaccaactacgttgactacctggatgaactcgccttggagataggtgcaaagccagatttcgtctctctctttttcaaagaccctaaactggctgtgaaactctacttcggaccctgtaattcctaccagtaccgcctggttggacctgggcagtgggaaggagccaggaacgccatcctcacccagaagcagaggatcctgaaacccttaaagacccggactctccagtcctctgatagtgccccagtgtctttcctgctcaagatcctggggctgctcgctgttgttctggccttctttttccaacttcaggggttttaatcagtcacatgacagttttctccatcactgcctctttgaaagggaaactggagaaattccatcctcattataattttactttaggggaataagtagggggactaattgtagggagatcagaaaacttaggtctagatataaaactaagttaaggttacaggatgttcttatcattgtttccccaaattcatcagtctccacatggtattctataataacaccagcacaggtagatagtactatcagccatggcaggttttgagttacaagattaaaaaaaaaaaaaaaaaaaaaaaaaaggccacacaa

SEQ ID NO: 1187 - DNA, 2737 bp, Mus musculus
ggcacgagcgtccagcctgttggtcccgtcccaaacgccctgacctgctccacccgggcccgggacccggtggtgccatcaccaacaccgctgccaggcacaatggaaggtcctcgctcagacgtgggccgctggggcaggagcccctggcagccccctacaacaccgtcaccggagccagagccggtgccggagccagacagacgctcgcgctcccgccgaggaggaggccgctccttctgggctcgttgttgtggctgctgctcatgtgggaacagaggggacgatgactggggacctgaaccttctggctccagaagcagagggaccagctcccggggtagggactctcggggtggccgaagacccgagtctcggggcagtggtgtaaatgcagctggagatggcaccatccgagagggaatgctggttgtgactggtgtggatctgctgtgctcacgatcagaccagaaccgccgagagcaccacacggatgagtttgaatatgatgagctgattgtgcgccgtgggcagcccttccacatgatccttttcttgaaccgggaatatgagtcctctgatcgcattgcccttgagctcctcattggaagcaatccggaggtgggcaagggcacccacgtgatcatcccagtgggtaagggaggcagtggtggctggaaggcccaagtgactaagaacaacggacacaacctaaacctacgcgtccacacctcccccaatgccatcattggcaagtttcagttcactgtccgcacccgctctgaagctggagagttccagttgccctttgacccccgcaatgagatctacatcctcttcaatccctggtgcccagaggacatagtgtatgtggaccatgaggactggcggcaagaatatgtgcttaatgagtctggaagaatctactatggaacagaagcacagattggcgaacgaacctggaactatggtcagtttgaccatggggtgctggatgcctgcctgtacatcctggatcggagggggatgccatatggaggtcgtggggacccagtcagtgtctctcgggttgtctctgccatggtgaactccctggatgacaatggagttctgattgggaactggaccggtgactactctcgaggcaccaacccctcagcgtgggtgggcagtgtggagatcctgctcagctacctacgcaccggctattccgtcccctacggccaatgctgggtctttgccggtgtgaccaccacagtgctccgatgtctgggcttcgctacccgtaccgtcaccaacttcaactctgcacacgacacagacacctccctcactatggacatctactttgatgagaacatgaagccacttgaacatctgaaccatgattctgtttggaacttccacgtgtggaacgactgctggatgaagaggccagatctgccctcaggctttgatgggtggcaggttgtggatgccacaccccaggagaccagcagtggcatcttctgctgtggcccctgttctgtggagtccgtcaagaatggcttagtctacatgaagtatgacacacctttcatttttgctgaggtaaatagcgataaggtatactggcagcggcaggatgatggcagctttaagatagtgtacgtggaagagaaagccattggcacactcattgtcacaaaggcgatccactccaacaatcgagaggacatcacccacatctataagcacccagaaggctcagaagcagagcggagggctgtggagaaggcggcagcccatggcagcaaacctaatgtgtatgccacccgggactccgctgaggatgtggcaatgcaggtggaggcgcaggacgctgtgatggggcaggatctggctgtctctgtggtgctgaccaatcgtggtagtagccgacgcactgtgaagttgcacctctacctttgtgtcacctactacactggtgtctctgggcctaccttcaaggaggccaaaaaggaagtgacattagccccaggagcctcggactctgtgaccatgcctgtggcctacaaggaatacaagccccaccttgtggaccagggggcaatgttgctcaatgtctcaggccatgtcaaggagagtgggcaggtactagccaagcaacacaccttccgtttgcgcaccccagacctttctcttacgttactgggagcagcagttgttggtcaggaatgtggagtacagatcgtgttcaagaaccccctgcctgtcaccctcaccaacgtcgtcttccggctcgaaggttctggattacagagacccaaggtcctcaatgtcggggacatcgggggtaatgagacagtcacactgcgccagacgtttgttcccgtgcgaccaggcccccgccagctcattgccagcctggacagtccacagctttcccaagtgcacggtgttattcaagtggatgtggccccagcctctggaggcagcggtttctcagatgctggaggtgacagtcgctctggggagaacatacctatggcatatcgaggtggagcttaaccctgggccaggagcaatgggactggaatcagatgaacaaggacattgccccaagatggggccccaccacagagtagctccccaggctcagacaggaagactggggcacctggggaggcagtcgctcttcatttgtgctgataataaactggttttttttttttaataaaaaaaaaaaaaaaaaaaa

SEQ ID NO: 1188 - DNA, 487 bp, Mus musculus
gatgtgaaaaacgtttttattataatctcttaaactttcagtgtatattttcattacaatcattggtacaataaatatggaaatgctgagcagacaattatcacagtggcctatgggctgagggacagggacccaggaatactgttaccctggatacttcctcagggccaatcaggaggtcttcaaagagtattgagagggagagggatagaaatattattaagactgtcagtgcagcaacttttagaatgtctattaaagccatggatacaggatttacgataacagaagatggatactaaaaaagaacagagactcaagttctcctgtaagaggcagaagaaacattgcagaagccagtgccttcctcgggtccccagtgtgtgcccccatccacccacgcattgtgttggtcatctccacctgccctgtgcccagccctgtgcccacccaggttctcctaggcacccaccttgcacctcgcacg

SEQ ID NO: 1189 - DNA, 2780 bp, Mus musculus
cggagaccgttctgtgctccctccgcccgcaaccatggcaaagcccctgaccgaccaggagaagcgacggcagatcagcatccgaggcatcgtgggcgtagagaatgtggccgagctgaaaaagggtttcaaccgtcacctgcacttcactctggtcaaggaccgcaatgtggccaccccccgcgactactacttcgcccttgcgcacacagtgcgcgaccacctggtggggcgctggatccgtacacagcagcactactacgacaagtgtcccaagagggtgtattacctctctctggaattttacatgggccgaacattacagaacaccatgatcaaccttggcttacaaaatgcctgcgatgaggccatttaccagcttggattggacatggaagagttagaagaaattgaagaagatgccggccttggcaatggcggtcttgggaggcttgctgcctgcttcctggactccatggcaaccctgggacttgcagcctatggctacggcattcgttatgaatacggaatcttcaatcagaagatccgagagggatggcaggtagaagaggcagatgactggctcaggcatggaaacccttgggagaaggctcgccctgaattcatgctgcccgtgcatttctacggaagagtagagcacacccagacggggacaaagtgggtcgacacccaggtggtcctggctctgccttacgacacccccgtgcctggatatatgaacaacactgtgaacactatgcgcctctggtcggctcgagcaccaaatgactttaaccttcaagattttaatgttggagactacattcaggctgtgctggaccggaacctggctgagaatatctccagagtgctctaccccaatgataacttctttgaagggaaggagctgcggctgaaacaggagtactttgtggtggctgccaccctgcaggatgtcatccggcgcttcaaggcctccaagttcggctccaaggatggcgtgggaaccgtgtttgatgcctttccagatcaggtagccatccagctgaatgacacacatcctgcactcgccattccagagctgatgaggatttttgtggacattgaaaaactgccctgggccaaggcatgggagatcacgaagaagaccttcgcctacaccaaccacacggtgctcccggaggccctggagcgctggccggtggaactggtggagaagctgctgcctcgacacttggagatcatttatgagatcaatcagaaacatttagacagaattgtggccttgtttcctaaagacatcagccgcatgcggagaatgtctctcattgaggaggaaggaggcaaacggatcaacatggcccacctctgcatcgtgggctgccacgcggtgaacggtgtagcaaagatccactcggacatcgtgaagacccaagtattcaaggacttcagcgagctagaaccagacaagttccagaataaaaccaacgggattaccccgaggcgctggctcctactctgcaacccagggctggctgacttgatagcagagaaaattggagaggattatgtgaaagacctgagccagctgacgaagctccacagttttgtgagtgatgacatcttcctccgggaaatagccaaagtgaaacaggaaaataagctgaaattctcccagttcctggagaaggaatacaaggtgaagatcaacccatcctccatgtttgatgtccacgtgaagcggatccacgagtataaaaggcagcttctgaactgcctgcatgtgatcaccatgtacaatcgcatcaagaaagaccctaagaaattcttcgtgccaaggacagtcataattggtggcaaagctgccccaggatatcacatggccaaaatgatcataaagctgatcacctctgtggcagaagtggtgaacaatgaccccatggtcggcagcaagttgaaagtcatcttcttggagaactacagagtgtctcttgccgaaaaagtcattccagccacagacctatcggagcagatctccacggcaggcacggaagcctctgggacaggcaacatgaagttcatgctgaacggggccctgaccatcgggactatggatggggccaatgtggagatggcagaggaagctggggaggagaacctgttcatctttggcatgagagtagatgatgtggctgctttggataagaaggggtatgaggccaaagaatattacgaggcccttccagaactgaagttggtcatcgaccaaatcgacaatggcttcttttctcccaatcagccagacctcttcaaagacatcatcaacatgttattttatcatgacagatttaaagtctttgcagactacgaagcctatgtcaagtgtcaagaaaaagtcagtcagctgtatatgaatcaaaaagcctggaacacaatggtactcaaaaacatagctgcctcagggaagttctccagtgaccgaacaattaaggagtatgccaaggacatctggaacatggagccttcggatctgaagatttccctatccaacgagtccagcaatggggttagtgccaatgggaagtgaatgctaaaatgtactcttattcaatgacttcttatggaacttgagtattttagagcttccctgattctgtttttgtcattgaatagttaagtgtctccggggatgggaagggaaaatgtatgtctgtattagagctaaaaataaaatgtcaacttccagttgtcaatcaataaaaaaaaaaaaaaaaaaaaaa

SEQ ID NO: 1190 - DNA, 289 bp, Mus musculus
ctctgtattaaacttcatccgagttgtttcctgtgaaaggaaaggggaggttgatcgctttgagatgattcctttttttcctgttttgagctgtggggttccttcgggccaggttaaacggggttcgagaaaaccttttcaggggtttagctgtaattatgaggtttacccactgagtgctttaatttttgtttgcgttggggttgggcggggagacccagcgatgctcgttctttctgataactgatggtgctgagaagctttggaataaaaccttttgttaactgag

SEQ ID NO: 1191 - DNA, 547 bp, Mus musculus
tttttttttttttttttcagttagcagagggttttattccaaagcttctcagcaccatcagttatcagaaagaacgagcatcgctgcctctccccgcccaaccccaacgcacacagacattaaagcactcagtgggtgaccctcgtgattacagctgagcccctgacaaggttttctcgaaccccgtttaacctggcccgagggagccccacagctcagaccaggaagagaaggagtcatctcagaccgatcaacctcccctttcctgtcacaggaaacaactcggcagaagttgaattcagcgactgccaggtaggaaggacagtgacctgtgaggcagcatgcagcgttgagagttcaaatcctagctaaccctcccctaatctactctaggaacaaggagcccaggactgtttgttctccgtacacctcagctgctcatcttactccgtcttactacaaacacaaagactgtgacagaggacaatgacatccaattaaaatgctacgagattctgagccgtcagagatgaggagagcaacggat

SEQ ID NO: 1192 - DNA, 249 bp, Mus musculus
aggggaggggtggtttattgttatgagttgatccttttttttctattatgacctgtggggttccctcgggccaggttagacggggtttgagcaaaccttttcaggggtttagctgtaatcacgagggtcacccattgagtgctttaatttctgtgtgcgttggggttgggcggggagaggcagcgatgttctttttttttgataactgatggtgctgagaagctttgggataaaaccctttgctaattc

SEQ ID NO: 1193 - DNA, 1256 bp, Mus musculus
atttagggctcagctcctggaacgtggagtgtgtttcagcccgggttcgaaggcaggcggcgagatgaagcgggcgccagcgttcctgagcgcagaggaggtgcaggatcaccttcgcagctccagccttctcatcccacccctggaggccgcactggccaacttctccaaaggtcccgacggaggggtcatgcagccagtgcgcaccgtggtgcctgtagccaagcaccgaggcttcctgggagtcatgcctgcctacagtgctgctgaggatgcgctcaccaccaagttagtcaccttctatgagggccacagcaacacagcggtcccctcccatcaggcatcggtgcttctctttgatcccagcaatggctccctgctggcggtcatggatggaaatgtcataactgcaaagagaacagcagcggtgtctgccattgccacaaagctgttgaagcccccaggcagtgatgtgctgtgcatccttggagcgggggtccaggcgtacagtcactatgagatcttcacagagcagttctccttcaaggaggtgagaatgtggaaccgcaccagggaaaatgctgagaagtttgcaagcacagtgcaaggagatgttcgggtctgttcatcagtgcaggaggctgtgacaggtgctgatgtcatcatcacagtcaccatggcaacagagcccattttatttggtgaatgggtaaagccgggggctcacatcaatgctgttggagccagcaggcctgactggcgagaactggatgacgagctcatgaggcaagcggtgctgtatgtggactcccgggaggctgccctgaaggagtcaggagacgttctgttgtcaggggctgacatctttgctgagcttggagaagtgatttcaggagcgaagcctgcacactgtgagaagaccacagtgttcaaatctttggggatggcagtggaagacctggttgcagccaaattagtatatgattcttggtcatctggcaagtgagttgaaggaaccgtgcctgagttggccatcacagctcaacactgtttcacaagtgtcaaaatcaaaggaggtccagtccccagtgaatggtagtgattgtcattcataagtactgacacccctattcatgtttgtggttggatagctaaaccaggtaaccatttcttctgttaaggggtgatggccacattatctacccttgatcttactagtcttgtatctctctgaaataaatcatttccacttcttc

SEQ ID NO: 1194 - DNA, 1451 bp, Mus musculus
agccgcctcggagtaggaacccgagagcgaccctgacagagtcatgtggctggaactcatcctggcttctgtgctgggctttgtcatctactggtttgtctcccgggacaaggaggagaccttaccacttgaagatgggtggtggggcccagggtcaaagccatcagccaaagaagatgagagcatccggcccttcaaggtggaaacatcagatgaggagatcaaggacttgcaccagaggatagataggttccgggcatccccacctttggagggcagtcgcttccactatggcttcaactccagctacctgaagaaagtggtgtccttctggaggaatgagtttgactggaggaagcaggtggagatcctcaaccaatacccacactttaagaccaagattgaagggctggacatccacttcatccacgtgaaacctccccagctgccctcaggccgcactccaaagcccttgctgatggtgcacggctggcctggctccttctatgagttctacaagattatcccactgctgacagaccccaagacccacggcctgagtgatgagcacgtgtttgaagtcatctgtccctcaattcctggctatggcttctcagaggcatccagcaagaaaggtttaaattcggtggccactgcgaggatcttctacaagctgatgtcacggctgggcttccagaagttctacattcaaggcggcgactgggggtctctcatctgcaccaacatagcccagatggtgcccaaccacgtgaaaggtttgcacttgaatatgtctttcatttcaagaaacatttattccctgacccctctcctgggccaacgttttgggagatttcttggctacacagagaaggatctggagctcttgtacccattcaaggaaaaggttttctacaacatcatgagggagagtggctacttacacatccaggccaccaagccggacactgtgggctgtgctctgaatgactctcctgtgggcctggctgcctacatcttagagaagttctccacctggaccaagtcagaataccgtgaactggaggatggaggcctggagaggaagttctccctggaagatctgctgactaacatcatgatctactggacgacaggaaccattgtctcctcccagcgcttctacaaggaaaacttgggccagggtgtcatggtccatagacatgaggggatgaaggtctttgtgcccactggctattcagccttcccttctgagatcctgcatgccccagaaaagtgggtgaaggtcaagtaccccaaactcatctcctattcctacatggaacgtgggggccactttgctgccttcgaagagcccaagcttctggcccaggacatccgcaagttcgtgtccctggctgagctgcagtgatgacgctacacaccaaccatggctttagcaacagccctgg

SEQ ID NO: 1195 - DNA, 3363 bp, Mus musculus
ttttgcaacattaaattgtgtcagccaagcaaatgcagccctatttataaaattgcttgcttctggtttcactttattgcatcgtgggctccgagagggagaaaaatgaagtttttgctgcttagcacatttatatttttgtatagttccttagccttggcaagagataagcattatttcattggaattactgaagcagtatgggactatgcttctggcactgaagaaaagaaacttatttcagttgacacggaacagtccaatttctatcttcaaaatggtccagatcgtattggaaggaaatataagaaggccctttattttgagtacacagatggcacctttagtaagactatagacaaaccagcctggctagggtttttaggccctgtcatcaaagctgaagttgaagataaagtttatgttcacttaaagaaccttgcctctaggatctacacttttcatgcacatggggtaacgtacaccaaggagtatgagggagccgtctaccctgataacaccactgattttcaacgggctgatgacaaagtgcttcccggacaacagtatgtgtatgtgctgcatgccaatgagccaagtcctggagagggagacagcaattgtgtgaccaggatttaccactcccatgttgatgctccaaaagatattgcatcaggactcataggacctctaatactctgtaaaaaaggttctctatataaggaaaaagagaaaaatattgaccaagaatttgtactaatgttctctgtggtggatgaaaatctcagctggtatctggaagataacatcaaaaccttctgctctgaacccgagaaagttgataaagacaatgaagacttccaggaaagcaacaggatgtactctataaatggatatacatttggaagcctcccagggctctcgatgtgtgcagcagacagagtgaagtggtacctttttggtatgggtaatgaagttgatgtgcattcagctttctttcatggccaagccctgaccagcaggaactatcaaaccgatataatcaacctgttccctgccaccctaattgatgcttatatggtggcccagaatcctggagtctggatgctcagttgccagaacctaaaccatctgaaagctgggttgcaagcctttttccaggtccaggactgtaacaagccttcatcaaaggataatatccgtgggaagcatgttagacactattacattgctgccgaggaagtcatctggaattatgctccctctggtatagacatcttcactgaagaaaaattaacagcctctggaagtgattcaggggtattttttgagcaaggtgccacaagaattggtggctcttataaaaaaatggcatatcgtgagtacacagatggttccttcacaaaccgaaaagagagaggccctgatgaggaacatcttggaatcctaggtcctgtcatttgggcagaagtaggagacaccattaaagtcacctttcataacaaaggacagcatcatctcagcattcagccaatgggagtaagtttcactgcagaaaatgagggaacatactatggcccaccaggtgcgtcctcacagcaagcagcctcccatgtggctcccaaahaaacctttacatacgaatggactgtccccaaagaaatgggacccacttatgcagatcctgtgtgcctatctaagatgtactactctgccgttgaccccaccaaagatatatttactgggcttattgggccaatgaaaatatgcaagaaaggcagcttacttgctgatgggagacagaaagatgtagacaaagagttctacttgtttcccacagtgtttgatgagaatgagagtttactcttagatgataatatcaggatgttcacacatgcacctgatcaggtggataaggaagatgaagactttcaggagtctaataagatgcactccatgaatgggttcatgtatggcaatcagtcctggcctcatatgtgtctaggagaatccatcgtgtggtatttgttcagcgctggaaatgaggctgatgtgcatgggatatacttttcaggaaatacttatctgtgtaaaggagaagagagagacactgcaaacctattccctcataaaagtctcacccttctcatgaaccctgacacaaaagggacttttgatgttgagtgccttacaacggatcactacacaggtggcatgaagcaaaaatacactgtgaaccagtgccagcggcagtttgaagatttcactgtctaccttggagaaaggacctactatgtggacgccgtagaggtggaatgggattactcaccaagcagggcctgggaaaaggagctgcatcatttgcaagagcaaaatgtttcaaatgtatttttggataaagaagagtttttcataggctcaaagtacaagaaggttgtgtatcgccagtttactgacagctcattcagagaacaggtgaagagacgagccgaagaagacgagcacttgggcatccttggcccaccaattcatgcaaatgttggagacaaagttaaagttgtctttaaaaatatggcaaccaggccatattcaatacatgcccatggggtgaaaacagagagttctacagttgttccaacgttaccaggtgaagttgcaacttatacatggcaaattccagaaagatcaggggctggaagagaggattcagcttgtatcccatgggcttattactcaactgtggatcgagttaaggacctctatagtgggctaataggcccattgattgtttgtcggaagtcttatgtgaaagtattcagtcctaaaaagaaaatggagtttttccttctgtttctagtatttgatgagaatgaatcttggtacttagatgataacatcaaaacatactctgaacaccctgagaaagtaaacaaagacaacgaggaattcctagaaagcaataaaatgcatgctattaatgggaaaatgtttggaaacctacaaggcctcacaatgcacgtgaaagatgaagtcaactggtatctgatgggaatgggcaatgaaatagacctgcacactgtacacttccacggccacagcttccaatacaagcacaggggagtatacagttctgatgtctttgaccttttccctggaacataccaaaccttagaaatgtttccccaaacacctggaacctggttactccactgccacgtgactgaccatgtccatgctgggatggcaactacctacactgttttaccagtagaacaagagactaagtctggctgaatgaaataaattggcgataagtggaaaacgagaacaatgagtcatttcaaacatttcaaaaaaaactcg

SEQ ID NO: 1196 - DNA, 1854 bp, Mus musculus
ggcagtctaaagtcatcctcgccatcctcgccttcctggtgtgattcgcagaagtagaaagaacaccagcagctgctttgaaataccctggagctggcagatgatggacaggaaacagacagctgagaccctgctgaccctgtctcctgctgaagttgccaacctcaaggaagggatcaatttttttcgaaataagactactgggaaagagtacattttatacaaggagaaggaccatctaaaggcatgcaagaacctctgcaagcaccagggaggcctgttcatgaaagacatcgaggatttagatggaaggtccgttaaatgcacaaagcacaactggaagttagacgtgagcaccatgaaatatatcaaccctccagggagcttctgtcaagacgagctcgttattgaaatggatgaaaacaatgggctttccctggtagaactgaaccctcctaacccctgggactctgatcccaggtctcctgaagaattagcttttggggaagtacagataacatatctcactcatgcctgcatggacctcaagttgggagacaagcgaatggtatttgacccttggttaattggccctgcttttgcccgaggatggtggttgctacatgagcctccatctgactggttggagaggctgtgcaaagcagacctcatttatatcagccacatgcactcagaccacctgagctaccctaccctgaagcagctttcccagagacgaccagacattcccatttatgttggcgacacagaaaggcctgtgttttggaacctggatcagagtggcgtcgggttaactaacatcaacgtggttccatttggaatatggcaacaggtagacaaaagtctgcggttcatgatcttgatggacggcgttcatcctgagatggacacatgcattatcgtggagtacaaaggtcataaaatactcaacacagtggactgcaccagacccaatgggggaaggcttcctgagaaagttgctctaatgatgagtgatttcgcaggaggtgcatcaggctttccaatgactttcagtggtggaaaatttactgaggaatggaaagcccagttcattaaggctgaaagaagaaagcttctgaattacaaagctcagctggtgaaggacctgcagccccgaatctactgtccgtttgctgggtactttgtggagtctcacccatctgacaagtacattaaggaaacaaacaccaaaaatgacccaaatcagctcaacaatcttatcaggaaaaactctgacgtggtgacatggaccccacgacctggcgctgtcctcgaccttggcaggatgctgaaggacccaacagacagcaagggcattgtggagcctccagaggggacaaagatttacaaggattcctgggactttggcccgtacctggagatcttgaattctgctgtcagagatgaaatcttctgtcattcatcctggattaaagagtacttcacgtgggctggatttaagaattacaacctggtggtcaggatgattgaaacagatgaagatttcagcccttttcctggagggtacgactatctggtggactttctagatttatcctttccgaaagaaagacccagccgggagcatccttatgaagaaatccatagccgggtggatgtcatcaggtacgtggtgaagaacggcctgctgtgggatgatctgtatattggattccagacccgattgctgcgggaccctgatatataccatcatctgttttggaatcattttcagataaaactccctctaacaccacccaactggaagtcgttcctaatgcactgtgattagtctggacctggtaagtccca

SEQ ID NO: 1197 - DNA, 2100 bp, Mus musculus
atggaagtccatgaattgttccggtattttcgaatgccagagctgattgacattcggcagtacgtgcgcacccttccaaccaacaccctcatggggtttggggcttttgcagcgctcaccaccttctggtatgccaccaggcctaaggccctgaagccaccatgtgacctctccatgcagtcagtggaaatagcgggtaccactgatggtattcgaagatcagcagtccttgaagatgacaagctcttggtgtactactacgacgatgtcagaaccatgtacgatggcttccagagggggattcaggtgtcaaataatggtccttgtttaggttctcggaagccaaaccagccctatgagtggatttcctacaaagaggtggcagaactggctgagtgcataggctccgggctgatccagaaggggttcaagccttgctccgagcagttcatcggcctcttctctcaaaacagacccgagtgggtgatcgtcgagcaaggatgcttctcttactcaatggtggtcgtcccgctctatgacacccttggagctgacgccatcacctacatagtgaacaaagctgaactctctgtgatttttgctgacaagccagaaaaagccaaactcttattagaaggtgtagaaaacaagttaacaccatgccttaaaatcatagtcatcatggactcctacggcagtgatctggtggaacgaggcaagaagtgtggggtggaaatcatcagcctcaaagctctggaggaccttggaagagtgaacagagtgaagcccaagcctccagaacccgaagatcttgcgataatttgtttcacaagtggaactacaggcaaccccaaaggagcaatgatcactcaccaaaacattataaacgactgctcaggttttataaaagcaacagagagtgcattcatcgcttccacagatgatgtgctgatatctttcttgcctctcgcccatatgtttgagaccgttgtagagtgtgtaatgctgtgtcatggagctaagataggatttttccaaggagatatcaggctgcttatggacgacctcaaggtgcttcagcccaccatcttccctgtggttcccaggctgctgaaccggatgttcgacagaatttttggacaagcaaacacttccttgaagcgatggctgttggactttgcctccaaaaggaaagaggcggacgttcgcagtggcatcgtcagaaacaacagcctgtgggataaactcatcttccacaagatacagtcgagcctgggtgggaaagtccggctgatgatcacaggagcagccccggtgtctgccacagtgctgacgtttctgaggacagcgctcggctgccagttctatgaaggctacggacagaccgagtgcactgctggttgctgcctgagcttgcccggagactggacggcaggccatgttggagcccccatgccttgcaattatgtaaagcttgtggatgtggaagaaatgaattacctggcatccaagggcgagggtgaggtgtgtgtgaaaggggcaaatgtgttcaaaggctacttgaaagacccagcaagaacagctgaagccctggataaagatggctggttacacacgggggacattggaaaatggctgccaaatggcaccttgaagattatcgacaggaaaaagcacatatttaaactagcccaaggagagtacatagcaccagaaaagattgaaaatatctacctgcggagtgaagccgtggcccaggtgtttgtccacggagaaagcttgcaggcctttctcatagcagttgtggtacccgacgttgagagcctaccgtcctgggcacagaagagaggcttacaagggtccttcgaagaactgtgcaggaacaaggatatcaataaagctatcctggacgacttgttgaaacttgggaaggaagccggtctgaagccatttgaacaggtcaaaggcattgctgtgcacccggaattattttctattgacaacggccttctgactccaacactgaaggcgaagaggccagagctacggaactatttcaggtcgcagatagatgaactgtacgccaccatcaagatctaa

SEQ ID NO: 1198 - DNA, 2731 bp, Mus musculus
cagagtgtctgaacagcacgctcacccatctcctctccgcctcgctctcctgacctgttcacccatccatcatccggccggccaccgctctgaacaccttccaccatggccacctcagcaagttcccacttgaacaaaggcatcaagcaaatgtacatgtccctgccccagggtgagaaagtccaagccatgtatatctgggttgatggtaccggagaaggactgcgctgcaagacccgtaccctggactgtgagcccaagtgtgtggaagagttacctgagtggaactttgatggctctagtacctttcagtctgaaggctccaacagcgacatgtacctccatcctgttgccatgtttcgagaccccttccgcagagaccccaacaagctggtgctatgtgaagttttcaagtataaccggaaacctgcagagaccaacttgaggcacatctgtaaacggataatggacatggtgagcaaccagcacccctggtttggaatggagcaggaatatactcttatgggaacagacggccacccatttggttggccttccaatggcttccctggaccccaaggcccgtattactgcggtgtgggagcagacaaggcctacggcagggacatcgtggaggctcactaccgggcctgcttgtatgctggagtcaagattacggggacaaatgcggaggttatgcctgcccagtgggaattccaaataggaccctgtgaggggatccgaatgggagatcatctttggatagcccgttttatcttgcatcgggtgtgcgaagactttggggtgatagcaacctttgaccccaagcccattccagggaactggaatgttgcaggctgccataccaacttcagcaccaaggccatgcgggaggagaatggtctgaagtgcattgaggaggccattgacaaactgagcaagaggcaccagtaccacattcgcgcctacgatcccaaggggggcctggacaatgcccgtgctctgactggattccacgaaacctccaacatcaacgacttttctgctggtgttgccaaccgcggtgccagtatccgcattccccggactgtcggccaggagaagaagggctactttgaagaccgtcgccttcgtgccaattgtgacccctatgcggtgacagaagccatcgtccgcacgtgtctcctcaacgaaacaggcgacgaacccttccaatacaagaactaagtgaactagacttccagtgatcctctccgagctcttccctttccgagttgtcccgactggaactgacccggatggaatacaaggtctttttattcctcgtgcccagttcctcttgcttttgttggtagaatagagggtcaggttcttaatctctacacaccaaccctttctttcctatctagctttctagtaggaggcgggaggggaagggtaaccccactgcttcatctcatcgggtatgcatgtccggtaggcatagctgtcacaaagcgggtgtacttatggtgaaagaggacattttttttttcttcaggatagttgaaagggcaggccatccatcaggtgacgcggtgagtgtgttcacacagagggggacggatgcccctcccccaagccaaggaagcacaggctaagaaaccaaccttcaactcctcacctaacttccatttggaacagaaagctggtttcccctttagaaataacagctctctaccaacagtggaaatgtcaatctcagccgttggccctactgtgaaggaagaaaaaagttggcatttcttggctcctgcattcataacacaaagcagagtagtatttttatatttaaatgttaaaaacaaaaaagttatatatatatggatgtgtggatgtatgtctttctaattgagagaaccatcctattcactgggtgccaagtttgatgaccaggggcttggcttagaagtgaggctcccttgaggtaggggtgaggatgcagtaccgggaaagttggttatcttggggtctcagcttcattactgcttagggtttccctgcccactctgcaggagcagatgttggacaggtagccagtgggatgccactgcttgccaccacctgtccccaggcttaggtttaggggatgcgtatacttactccacacacgagttagaagtatgagttggctggtcaacttgaacactgttactgatgggtgggtggatgggtgattactgggatattttttggtgggattagcatgtcactaaaaagggccttttgatatattaagttttttaaaagcaaaacaagtttagattttaatcagatttgtagggtttctaactttacagaattgcctgtttgtttcaatgtctccctccacttggctcttaggggaattaagggacaggcatagagtaaaacacttgtctcctatgagactcatagccagacagactgttacttggcttctgaaaaagccaatagtcttttttttttcttttatagtaaacacacccccacctccagcccagcctgtgccccttacgttttctggttgtttgtgtcggcagcgggccaactgtggtttctctcttgccatgatgacttctaattgccatcgtatagtatgttcggttagataactcactgtaaacagactgtaactgccaggcagcgcttataaatcaacctaacatttataagatttcctctgacttgtttctttgtggttcccaaaaaa

SEQ ID NO: 1199 - DNA, 2126 bp, Mus musculus
cgagtgaccctgggggagggagctgtgttctgttgagacgactcctctctgatgtacaataagaaaaaacagaacacagctccctccacgagtgaccctgggggaatttttcgaccatcccttgctccaacgtaaggaacagaacttgagaccttgtcacaggaacataaagtcagattgctaaacttctgcatttactgagaaacatggtgaagcgagtggcaattgtgggagctggggtcagcggcctggcctccatcaagtgctgcctggaagaggggctggagcccacctgcttcgagaggagcagtgacctggggggactttggagattcacggaacatgttgaagaagggagagccagtctttacaagtctgtggtttctaacagcagcagggagatgtcgtgttacccagattttccttttccagaagactatccaaactttgtgccaaattctctattcctggaatatctcaaactctactcaacccagttcaaccttcagagatgcatttatttcaataccaaagtgtgcagtataacaaaacgcccggattttgctgtctctggacagtgggaagtggtcactgtcacaaacgggaagcaaaactcagccatctttgatgctgtcatggtctgcactggttttctaactaacccacatctgcccctggattccttcccaggtatactaacttttaagggggagtacttccacagccgacagtataaacatccagacatatttaaggacaagcgagtccttgtagttggaatggggaattctggcacagatattgccgtggaggccagccacttagcaaaaaaggtgttcctcagcactactggaggggcatgggtgatcagccgagtctttgattcagggtacccatgggacatgatattcatgacacgatttcagaacatgctcagaaatcttctcccaactccaattgtgagttggttgatatcaaaaaagatgaacagctggttcaaccacgtgaattacggtgtagctccagaagacaggactcagctgagagagcctgtgctaaatgatgagctcccaggccgcatcatcactgggaaagtgtttatcaagcccagcatcaaggaggtaaaggaaaactctgtcgtgttcaacaacacaccaaaggaggagcccattgacatcatcgtctttgcgactggatatacttttgcgttccccttcctcgatgaatccgtagtgaaagttgaggatggccaggcatcactgtacaagtacatcttccctgcgcatctgccaaaaccaactctggctgtgattggcctcatcaagcccctgggctccatggtacccacaggagagacacaagctcgatgggttgttcaggtcctaaaaggtgcaactacattaccaccgccaagtgtcatgatggaggaagttaatgaacggaagaaaaacaagcatagcgggtttggcttgtgctactgcaaggctttgcaaacagattatataacatacatagatgacctcctgacctctatcaacgcaaaaccggatctgcgggccatgctcctgactgacccacgactggctctgagcatcttctttggcccatgtaccccttaccatttccgcctgactggtccaggaaaatgggaaggagccagaaaggccatcttgacccagtgggaccgaacagtgaaagtcaccaaaactcgaaccatacaagaatccccatcttcctttgaaactttgctgaaactctttagttttctggctttgctcatagctgtcttcttgattttcctgtaagtgaaagatctaactggcttttcaaatgtatggagtataacgttccaactcctctaatgtaacaactttgtcttcataatcataaaccatatccaaagaatgaaaccctaccccctcccctttccggttcacctcactggcagcttggtattgctgggtctcttgcagctccattaggtttaatgccagaagataaggtccagcacttttgttcacttaaaatgttggaaggatccaggcccttttcaggaagaagctgcccccagagaatactctgagcattctttcgccctaaaaaagcaagtttcctagatcttaatg

SEQ ID NO: 1200 - DNA, 2020 bp, Mus musculus
attcggcacgagaaaggaagacaaagaaaaggcacccatgaagaagaaagtggccatcattggagctggtgtcagtggcctggctgccatcaggagctgtctggaggaggggctggagcccacatgctttgagaggagtgatgatgttgggggcctgtggaaattctcagaccatatagaagagggcagggccagcatttaccaatcggtcttcaccaactcttccaaagagatgatgtgttttccagacttcccctatcccgatgactttcccaacttcatgcatcacagcaagctccaagaatacatcacttcatttgccaaggaaaagaacctcctgaaatacatacagtttgagacacctgtaaccagtataaataaatgtcctaatttctcaactactggcaaatgggaagtcaccactgaaaagcacggtaaaaaagaaacagctgtctttgatgctacaatgatttgttctgggcatcacatatttccccatgtaccaaaagactcctttccaggactgaaccgttttaaaggcaaatgcttccacagcagggactataaggaaccaggaatatggaagggaaaacgagtcctggtgattggcctggggaactcaggctgtgacattgctgcagaactcagccatgtagctcagaaggtcaccatcagctctagaagtggttcttgggtgatgagtcgagtctgggacgatggctacccttgggacatggtggtgctcacacggtttcaaactttcctcaaaaacaacttacccaccgccatctctgactggtggtacacaaggcagatgaatgccagattcaagcacgaaaactatggtttggtgcctttaaacagaacactcaggaaagagcccgtgttcaatgatgagctcccagcccgcatcctgtgtggcatggtgaccatcaagcctaatgtaaaggagttcacagagacgtccgctgtgtttgaggatgggaccatgtttgaggccattgactgtgtcatctttgccacaggctatggttatgcctaccccttcctggatgactctattatcaaaagcagaaataatgaggtcactttgtacaaaggtgtcttccctcctcaactagagaaaccaaccatggcagtgattggcctggtccagtccctgggtgccaccatccccataactgacctgcaggcacgctgggcagcacaagtaataaaaggaacttgcactttgccttctgtaaacgacatgatggatgacattgatgagaaaatgggggaaaagttcaaatggtatggcaatagcaccaccatccagacagattacattgtttatatggatgaactggcctccttcattggtgcaaagcccaatctcctatggctgtttctcaaggatcccaggttggctgtagaagtgttctttggcccttgcagcccctaccagttccggctggtaggcccaggaaagtggtcaggagcccggaacgccatcctaacacagtgggaccgatcactgaagcctatgaagacgcgtgtcgtcagtaaagttcagaagtcttgctctcacttctattcccgtttgctcaggctcctggctgttcccgttctgctcattgctttgttccttgtgttgatctgatcgtgagtccctctagaatttctgagagtcactgacaacaaccagacaagaactttgctatttaaaaattaagatttttcacacctctccctttcctgttcaagatcttttgccagaactctagacgttaattagtaagcaagacaatgttttgttctggctttgtaactaagcccctttcagaatcatgttgatctgcagtgggcataagtccctttctctttaagttccaccaacaatttgtaaggagaatggtatttttatggacaacttgtatcatctcttggaacagttggacatgattccttttctcttttaaacaatgcttgaaagatatacttcagattcagacagtgaataaaatagagtatttagaat

SEQ ID NO: 1201 - DNA, 1415 bp, Mus musculus
cgcgccccagcccgccatggcccggatcctccgggcatcctgccttctgtccctgctcctggccgggtttgttccgccgggccggggacaagagaagtctaagacagactgccatggcggtatgagtggtaccatctacgagtatggagccctcaccatcgatggggaggaatacattccttttaagcagtatgcaggcaaatatatcctctttgtcaacgtagccagctactgaggtctgacagaccaataccttgaactgaatgcactacaagaagaacttgggccatttggcttggtcattctgggcttcccttccaaccaatttggcaaacaggagccaggcgagaactcggagatactccccagtctcaagtatgttcgaccaggtgggggctttgtgcctaatttccagctctttgagaaaggagatgtgaacggggagaaagagcagaaattctacactttcctgaagaactcctgccctcccactgcagaactcctgggctcacctggccgcctcttttgggaacccatgaagatccatgacatccgctggaactttgagaagttcctggtggggccagatggcataccggttatgcgctggtaccaccggaccacagtcagcaacgtcaagatggacatcctgtcttacatgaggcggcaggcagccctgagcgccagggggaagtaactgatgcccccaccctacccctaccccctgcccatcatgcaagggccgaggaggggctcttcaggaaggaagccacattcccagtcattctaccccaccccagattctctttcttattacataaaagacaagcctggcacaactgtgtgtctgaaccactgtggacacgtgacaattgtcccagtgtgtgcatggctacacagccacgtatctgcctgcttgaaacccagggatggtccatctgtgtttacggcttggcacaacaccctcatatttttttcagctttctgttccaaatgagcccaaaggaaacacaagttctaggtccaatggttctgctcaaacctgaacatcattcttggggccagcatctcccacatgcccacactacacaccaccagcctccttcttccttcctgaaggaccctcctgagcccccaagcccatcccacagtgctcctgagaccagccaagacaactgtgagcgcgatggccgtgtaccccaggtcaggggtggtgtctctatgaaggaggggcccgaagcccttgtgggcgggcctcccctgagcccgtctgtggtgccagcccttagtgcattcaggcttaggctcccaggcagggacactacccccgcgcctctggaggacatgctatcctctcactctgtccactggtatctcaacacccccatctgcccagtaaaggtctttctgcagca

SEQ ID NO: 1202 - DNA, 480 bp, Mus musculus
  misc_feature (420)..(420): "n" = a, t, g, or c.
  misc_feature (448)..(448): "n" = a, t, g, or c.
ttgtttttttaaaaaatggtttatttgttataaaaggttaaatactaaagctaaaaacatataaattcaggtcagactatattaaaatacatacataccctttgcaaaatctgattaaaagttgcattaaacagatgctttaaataaaataaagtaatttttgaagacattttaaatctaattggctatatcagtgtagtatcatttataaaattacagttgaaaagtttggccactttggaaatccacctgatttctacgtcttctattctcaatatgaagttccagtatggcttgcacaggagtgggcttcagctaccatgccaatgttctctattagaaatctagtcccttacagcagaatagggatatagtcagcagcatacaaagaatacacaacaggatgcaagcccggcctgnaaagagccttagttaactacacagtatncttcttaagtaaaatgcttggaaaataggtgg

SEQ ID NO: 1203 - DNA, 245 bp, Mus musculus
gaagggtgacgggccgagggattgcaagggaactttaatgtaatttcatttatgatgtcacctccctgcaattatttttttggcccacgcctttcaaatttcccaatccattagaaattttccccccggccagatgcgattattgaaactgcctcattgtcactggttaacaacttgcgagattgaagggcttttgttattgttgttggatatttttatttcccataaaagcacatcatttcaac

SEQ ID NO: 1204 - DNA, 803 bp, Mus musculus
cttggcctaggccactggtccctagagggcaagacattcatatcagacccccacccatcatcccctggcaatgctatgacattagcgggtctcacagttgaagtttttccgaagggtgactgttgagaggattccagaatgaggccttgaccaacactgctcatgttctttcccggtggcctcagggactgactctcgtgctttctgggacaagggagaacagagccttctcacacccccacttcaattctgagtcattgatcagtggtagctgttccctcttggagatgcctgtgtcacagttcttgggggggttgtggatcccaggggaaagatggagaagtttaaaaggacaattacaacactcaagaagctggtgatgtgacgtggcgagtgtagaaatgacgtcagcaaagcaaaccgttcctgagcacctgctgaatgctgagcactgagtgggggagggggaggggcaccgggatgattcatagaaggccctagttttccgggcatgcctagtaacgggagacctggtgcagaaatcaaaaaggatcagaagaatctgcacatttggaaggtgacggggccgaaggactgcaagggaccgttaatgtactctcatttatgatgtcacctccctgcaacttctctttttgccaacgcctttcaacttcccaatcattagaatgtccccccggccgatgcaacattgaactggctcatggcactggttacaaactgccagattgagggcttttgttatgttgtggatattttatttcccttaaagccatcatttcacc

SEQ ID NO: 1205 - DNA, 358 bp, Mus musculus
gtttaaaaggacaattacaacactcaagaagctggtgatgtgacgtggcgagtgtagaaatgacgtcagcaaagcaaaccgttcctgagcacctgctgaatgctgagcactgagtgggggagggggaggggcaccgggatgattcatagaaggccctagtttctggggcatgcctagtaacgggagacctggtaagacgtgtgccagacgtaacgtaacgtaacgtaacgtaacgtaacggatgcaaggcagaacgtgacggacggaggcctgagaaagtgtgtgtgacgttgctgaaggcgtgtgcagctggtgcagacccaaggaggcttctggaagaggttgcatgcgagcagaa

SEQ ID NO: 1206 - DNA, 425 bp, Mus musculus
ttttttttttttttttttttaaacatttcatttaaaaatatgcagctttattttaaatttaaaattcagtatgctcaaatatggcagttaatgtctcccacatatgtaaaagtttaaggtaacacatttttttcataaattataaaatgttttcagctaaatgtttcatgaaaattctcaaatgactgtcaagagtttgtcttgttgttagcccaccagaatactcaacattcagagctaaaaggtaacaatttgggaaatctttaagattcttgtgtgatacaagtcacagaagcacacatataaagacagctgagtgacagataaatcagtagtagttcctgcttttacctagggggcaaggtaggtacgcatttgctgagcaagtttgcaaaatgcaagaggactcaaagggtgaccaaatt

SEQ ID NO: 1207 - DNA, 5893 bp, Mus musculus
tggatgcggacgctgggaggagagcccctgagctaggagctgggagcagaggcgcagagaacacgtagcgactccgaagatcagccccaatgaacatgtcagtgttgactttacaagaatatgaattcgaaaagcagttcaacgagaacgaagccatccaatggatgcaggaaaactggaagaagtctttcctgttttctgcgctgtacgctgcctttatctttggtggtcggcatctgatgaacaagcgagccaagtttgaacttcggaagccgctcgtgctctggtcgctgactcttgccgtcttcagtatattcggtgctcttcgaactggtgcttacatgctgtacattctgatgaccaaaggcctgaagcagtcagtttgtgaccagagtttttacaatggacctgtcagcaaattctgggcttatgcatttgtgctcagcaaagcacccgaactaggtgacacgatattcatcattctgaggaaacagaaactgatcttcctgcactggtaccaccacatcactgtgctcctgtactcctggtactcctacaaagacatggtcgctgggggtggttggttcatgactatgaactatggcgtgcatgccgtcatgtactcttactacgccttgcgggctgcgggtttccgagtctcccggaagtttgccatgttcatcaccttgtcccagatcactcagatgctgatgggctgtgtcattaactacctggtcttcaactggatgcagcatgacaacgaccagtgctactcccactttcagaacatcttctggtcctcgctcatgtacctcagctaccttgtgctcttctgccatttcttctttgaggcctacatcggcaaagtgaagaaagccacgaaggctgagtagtgtcagggctgaggaggaagtcatagctcagggtcatcacgaaaaataatcgacaaaagaaaaatggcacaaggaatcccatatggtgcagctaaaacaaaacaaaacatccgtatgagcaggcacgaggcccaaggcagcttgggactgaagattaggttgtaagtttatgatcctttctgggtgaggactcgctgagtgcaactcttatctcaaagcacggctgctgaggggaccccttccctctggcctgtcaactctagaacacactagatgcaaaggcagccacgggcaaagagattgggcagagattagtggacggccagcaaaacactgcaggaagcaggtggggggaggaatctactcagcctttttgttttgttttgttttgttttgttttgtttttctctaaggataaaggagtttccccttttcaaacgatgtgagcacacacacacacacacacacacacacacacacacacacacacacgcaatcttttcaacacgaaaccagagctaaaagaaaagataaacatgggagagacagggtttctatctgggacagcaatgcttttgcaaaaggctaggccttttaaagaaaggtgagcttgtaactccttgataaaagatgtcttaattatttttactgcaactgaaagtaaagaggtagagcctttccccttctgcacagcctcagggcttgtatgttcgctacaaccaaacacaggacagtacttcccccatgatactttattactgggagaaagaaacccctgtagttgaaacaccacactgacaactgttatttctgctctccgacgagaattcaagcatccgttgttcagttgccccaaactttagtgacggaggagtaaatgcagaactgaaagggaagaagctcagctggctggcttgaaaatggagtcttgtaccatgtgtaacaaatgccagcccatcgtccctggagctgaacagggaggaagggctatgggcagagactagagccggattcatccaatgtgcagacagcgtgttcgcctccctccctgttcgacctcacacataatcctggctttctaaatgaggccctgtgacacactctgtgctttctatatttttgtgactttcaaacacagatctgcagggctctgcctgatttggggtaaacactgtgtttctgcagcctctgcatttgctcccttcagcagtgcagaggcttgagaagtgccctctgctggcttagtgagaagcttcaacaaacacttcacagtagtgttgaaataactgaccactaagggcctgcggagattaaaccctaagttctaagtgctgtcaaacacctgacatatatttgaccaaatcagaaattttttaggtgactttcacttgagaactcagaaagtcaatgtattaagagccatattctgaaagaaagaaagagaaagagagaaagaaagaaagaaagaaagaaagaaagaaagaaagaaagaaagaaagaagaaagaaagaaagaaagaaagcaagctagacaatgttaactgtaatatttcagtcctctacaagccaaataaatgtgtcgatgttcctaatatttcaaagacgcaattacataaagttgttcaatgtgatataatagtattctaattggttaagtagtttaatgattaggcaaactagcagaaacaattagaggctgctacaccacgtagattatacacacatagccacgtacgtgaggtacacggagctataaagctcaaatcaatagtaacacgatttttggctagcagaaactatcacctatcttcctttacttgagagtgtacagtaaaagggatttttttcaaattatttttatattattttagctttaattgtgctgtcattcatggaacagctgctcagcagccttcctgtgagagatgacaggggtgttttcgtgtggcttgtttacgtgtggaattggaaaagaataaaatctgattcccttctgtgggaatgggatcaagggtagacaaaggacccatgtagatcaagtcataactgaacgaccagggaagggagccaggcgggggcgggagtcagctgtggctttcatgttaccattgtgtggtggctgatggacgggacgtggttggagggatgttttcttacttggggtagaagctaaccggagatgaaagtctagaagccactctgtccagtggaatcttagggtgtacttgttcctttgagctttgtaaatgcacaatagtgtacaataataagcctttcccttgccttatggaagaaagtgagcaagataatgaaaaccaagaagccacctatcagttgaattgagtctaatcaaaaggccagcctgaggctcctctggtcggttcagtttaatttagatatttaccatagaatacaggtacaatatggaaatctcataagcataaactttaaaacgactaagctatgcttccaaagcactttagtctcagtgttcttcgcttcatgctctctccacttgtaaaataacttagacttttcattcgcaggatgagtatataataattaagtttccaaaccagctaaactgtagctacaggcaattccagtgttcaccatgggaagaaaaagccacatgtttttttaaaaacacagaattctgatataggctcagcacacagtttttaacatatcagcttagctgctctaattgtatcaagatacgaggctggaccactggcctatgacacatctaaaacctgccagaattgactgccacgtagataatactgctgtcagtgaacattccgggcaagcaagtttttgtagctgccccactatgctgcaatagattatctttctattgaagatttctcgctgcattccaatcccagtgtggtgaaaacttaattcctggattgaatgaacacaaatccgaggtttcatataaacgcagtgcggtcactaggtctgagcatcaactcaaatgtgttgagtttgcaatgaaattctagtgagaatcactccattcacacagtaggagatttttatctggaccttctagtgtcaactgtgaggagaaacaactatcattattatttatttattgtatttatatccaatgccaggccaaagtattgatttagatcaagcagtgcccttcccccccctcccaaccccccatctttctaatccttctgcactatagaaagtcaagactggaggggaaatccatattcattgctgcaggggaaagcaggtttattaatcctcccgctgtctttatgagaccgattgaccaatgtagctcaggcagaagtttcatgtgggtgggatatctacaggagcctaggaaaacacttccagagaagataaccacagactgttgtttttgttcatttgttttatatcttcatggtaagataagcctgtcacggagttacaaggcaccatgacactaaggtagaatgttccagaagtctggctaccttcccaggctgctcagttacctgggagtgtctagttactatcttgttctgacgagaggagcttttgctcaagaactgccagatacagacaccaagtcagccctggcacactctacaacctccgggcataggtaatgggtctttgactattggattgcctcagtgtcaagtgagttcctagaagaagagaccgagtaggctctaccccccagactccaccacactctgagttgcattgacaggatcggtgtctagacacagttctttgtgaagtgtcaatgctagagacagttgtgaggagatcatgatgacagcccagaactttctagctttcaaatgcatccttttccagtctttgttttgataacagctattttgctatcagtttgggacaacagtagagtctgtggccatgtgatctacagcttatgatcacacagctcccatttcctggtgcctgagatcccagccatcagaaagtgatttgggtgagaattcacaacatatatgtcacctctgcatattgaagtgacatctaataaaacaaggacgtcctattttgtctgaacccgctgaatgaagctctgttatcctagttagtcattgggccgccatcctctgtacccgatagtgacacaaaacagatgtcggtgcctgtacaagaattctcagtgcctgttgtgacagactgtgcttagaagaaacattcgtgagccataaagcaggaaccacagatgaaagggccagttaaaagtccacctgctccaagtatcatagaaaacccaaaagcctgttgtataatctggtattgtccccatccccagatgctttgaaaactaggattctcagagcatggatacccacgcttccatcttcccacaaacatttcctagagttgtactggtgggtgcagccctaggtggttggttgggggaagtcttggaagctgtactttgattgcaggtcaagcaaagccaaatccagatatttctgtgtcactcaccagttgtccatgtccacccacaaaacaattgtattatagtcaagttgtcctagctgattggtcctcaaataaggatgcaactatgtttgcaacccagttaggacacatttgaaagaacctgactcactagcatctaaacaatatcatttccccaatgcttggtggcacttcagacttttgttctcctggttgatcaaggtgttgcctggtggtgccgcctcctagtgtgaatatttcagttaagtgtgggtctgagcatgaccgggctgggcttagctcactgctacttggaaaatgactggcattctgcttcctaggccctaaacccatattcagagggaaaattcactatcaagcctcacagcgaaatcacagcagtgttggaattcttattttcaagtgcttatctcacaacattgaaaaatatttttggtgtattaagatttaaaataaagtcatcataaacttttgaatttaaaaaaaaaaaaaaaaaaaaaaaaaaaaaaaaaaaaa

SEQ ID NO: 1208 - DNA, 2934 bp, Mus musculus
atggagcggcgctggcccctggggcttgcattgctgctgctgctgctctgcgccccgctgcccccgggggcgcgcgccgaggaagtcactctaatggacacaagcacagcacaaggagagctgggctggcttctggatcccccagagactgggtggagtgaggtgcaacaaatgctaaacgggacacccctgtacatgtaccaagactgcccaatacaggaaggtggggacactgaccactggcttcgctccaattggatctaccgcggagaggaagcttcacgcatctacgtggagctgcagttcaccgtgcgggactgtaagagtttcccagggggagctgggcctctgggatgcaaagagaccttcaaccttttctacatggagagtgaccaggatgtgggcattcagctccgacgacctttgttccaaaaggtaacaactgtggcagcagaccagagcttcaccatcagagacctggcatctgactctgtaaagctgaatgtagaacgctgctcgttgggccacctcacccgccgtggcctctacttagctttccacaacccgggttcctgtgtggcgctagtgtctgtaagggtgttctaccagcgctgtgccgagaccgtgcatggcttggcccacttccctgacactctccctggacctggagggttggttgaagtagctggaacgtgcctctcccatgcacagatcagcttggggtcctcaggtacaccacgaatgcactgcagccctgatggcgagtggctggtgcctgtgggtcagtgccagtgcgagcctggctatgaagaaagcagtggaaatgtgggatgcactgcctgtcctactggtttctatcgagtggacatgaatacactccgttgtctcaagtgcccccaacatagcatagcagagtctgaggggtctaccatctgtacctgtgagaatggacattatcgagcccctggggagggtccccaggtagcatgcacacgtcccccatcggctccccaaaatctgagcttctccacatcagggactcaactctccctgcgctgggagccccccagagatacagggggacgccatgatatcagatacagcgtggagtgcttgcagtgtcggggcattgcacaggatgggggtccctgccaaccctgtggaaaaggtgtgcacttttccccggctgcttccgggctcaccacatctaccgtgcaagtgcaaggcctcgagccttacgccaactacacatttaccgtcaaatcccaaaacagagtgtcaggactggacagttccagccctagcagcgcctccctcagtatcaacatggggcacgcagagtcactctctggcctgtcactgaagctggtgaagaaagaaccgaggcagctggagctgacttgggcagggtcccgaccccgaaatcctggagggaatctgagctatgagctgcacgtgctgaatcaggacgaagaatggcaccagatggtgttggaacccagggtcttgctgacaaaacttcagccagataccacatacattgtcagagtgcgaacactgaccccactggggcctggccctttctcccctgaccatgagtttcggacaagcccaccagtttccagaagcctgaccggaggagagattgtggccgtcatctttggattgctgcttggaatagctctgctgatcgggatttatgtcttccgttcaaggagaggccagagacagagacagcagaggcagcgtgaacgcaccaccaatgtcgatcgagaggacaagctgtggctaaaaccctatgtggacctccaggcctatgaggaccctgcacagggagccttagactttgcccaggaactggacccagcctggctgattgtggacactgtcataggagaaggggagtttggtgaagtgtatcggggagccctgagactccccagccaagattgcaagactgtggccattaagaccttgaaagatacatccccagatggctactggtggaatttccttcgagaggcaactatcatgggccagttcaaccacccacacattctacgcctagaaggtgtcatcacaaaaagaaagcccatcatgatcatcacagaatttatggaaaatggagccctggatgcctttctgaaggaacgggaggaccaactagctcctggtcagctagtggctatgctactgggcatagcatcaggcatgaactgcctcagtggccacaattatgtccatagagacctggctgccaggaacatcttggtgaatcagaacctgtgctgcaaggtgtctgactttggcttgacccgcctcctggatgactttgacggcacctatgaaacccagggaggaaagatccccatccgatggacagccccagaagctattgcccatcggatcttcaccacagccagtgatgtgtggagctttgggattgtaacgtgggaggtgttgagttttggcgacaaaccctatggggagatgagcaaccaagaggtaatgaaaagcattgaagatgggtaccggttgccccctcctgtggactgtcctgcccctctctatgaactcatgaagaactgctgggcttacgatcgtgcccgtcgaccccacttcctccagctgcaggcacatctggaacagttgcttactgacccccattccctaaggacaattgccaactttgaccctagggtgaccttacgcctgcccagcctgagtggctctgatgggatcccttatcgaagtgtctctgagtggcttgaatccatacgcatgaagcgctacatcctgcacttccgttcggctgggctggacaccatggagtgtgtgctggagctgacggctgaggacctgacgcagatgggaataacgttgccagggcaccagaaacgaattctctgcagtattcaaggatttaaggactga

SEQ ID NO: 1209 - DNA, 2166 bp, Mus musculus
cccggcctggccatggcggccccccgcccgcctcccgcgatctccgtctccgtctcggcccccgcgttttacgccccgcagaagaagttcgccccggttgtggccccaaagcccaaagtgaatcctttccggcctggggacagcgagcctcctgtagcagccggggcccaaagagcgcagatgggtcgggtgggcgagatcccaccaccacccccggaagactttcctttgccccctcctccccttattggggagggcgacgactcagagggtgccctgggaggtgccttcccacctccacctcccccgatgatcgaggaaccattcccccctgctcctctggaggaggacatcttcccctcccctccacctccactggaggaggagggagggcctgaggcccctacccagctcccaccgcagcccagggagaaagtgtgcagtattgacctggagattgactctctgtcctcactgctggacgacatgaccaagaacgatcccttcaaagcccgggtatcatccggatatgtacccccaccagttgccactccatttgttcccaagcctagtaccaaacctgcccctgggggcacagcacccttgcctccttggaagaccccttctagctcccagccaccacctcagccgcaggccaagcctcaggtccagctccatgtccagcctcaggccaagccccatgtccaaccccagcctgtgtcttctgctaatacacagccccggggtcccctttctcaggcaccaactccagcacctaagtttgctccagtggctcctaaatttactcccgtggtttccaagttcagccctggtgctccaagtggacctgggccacagcccaatcaaaaaatggtgcctccggatgctccttcttctgtgagcacaggctcccctcagccccctagcttcacctatgctcagcagaaggagaagcccctagttcaagagaagcagcacccacagcctccaccagctcaaaaccaaaaccaggtacgctctcctggaggcccaggccccttgaccctgaaggaggtagaggagttggagcagctgacccagcagctgatgcaggacatggaacaccctcagaggcagagcgtggcagtgaatgagtcctgtggcaaatgcaatcagccactggcccgtgcacagcctgcggttcgtgcactgggacaactgttccacatcacctgcttcacttgccatcagtgtcagcagcagctgcagggacagcagttctatagcctggagggagcaccatattgtgagggctgctacaccgacactttggagaagtgcaacacctgtgggcagcccatcactgaccgcatgctgagggccactggcaaagcctaccacccacagtgcttcacctgtgtggtctgcgcctgtcccctggagggcacctccttcattgtggaccaggccaatcagccccactgtgtccctgactatcacaagcaatacgctccaaggtgctccgtctgctcggagccaatcatgcctgagcctggccgagacgagactgtgcgagtagtggcgctggataagaactttcatatgaagtgttacaagtgtgaggactgtgggaaacctctgtccattgaggcagatgacaacggctgtttccctctggatggccacgtcctttgtcggaagtgccactccgctagagcccagacctgagttgagatggacctccttccagaccacaggtccgtcccccaccgtggaccacccacactgaggccagtccttgcctctaccctccctgcattccaatcccctcccgagtctcaagtgccctgacccagggcctcagcatggcctacaagtattgaggctccctcctggtgctgaggcccagccctgggctccaacccttgcctcttctgcagggatcacccatcattctgaggtccccaacccaagggtcacatatagtgctgctgctttcactgctgcaccaatgcccttggctggcctgagcagcctatgcaatgtgcttgctgagggtagaagccctaaccctccaggagcgtggcttcagcagcctggacacccaccttgctctgtgctgctaggttgtggccacagctaagattataaaacctcattttccagaaaaaaaaaaaaaaaaaaaaa

SEQ ID NO: 1210 - DNA, 139 bp, Mus musculus
  misc_feature (46)..(46): "n" = a, t, g, or c.
cggccgcttcgatttttgggtggggtgttttcacaaagcaaatggnaataattttaattcaaccaccgatcaaaaagaaggaaggtaaatgttctccacatacatgatagaggaggggagcagttgtgaaaagggggag

SEQ ID NO: 1211 - DNA, 1022 bp, Mus musculus
  misc_feature (30)..(30): "n" = a, t, g, or c.
aattgcgatagcatcgatgttcaaccaacnacatcctgtctctcacggatgtcaccgtagaggccagtgctgctgaggaggcgcacgtgcacgtggctgtggtggtgcgacctggcaacgcggagctcactgacgacgagaagacatactacaacctcatcacgtccttcagcgagctctacctgccgtccacctagagccaggtctgaggaagaattgccgtcccctagtgtctagctttattctaactgtaaaagtaacgtacttatgtgtgcacacagacatgtgcaagggtatatacatggacatgtgctcagattagtttccatgggcacataatgtgagaaaagttgtccgttccatgaagaccaaattcatgtaaagacactttatgtgtagaccataaatctgtcttaccaagcccggggtgtatttgaaactgcaaaatactaatcaaatttgtgatgtttatcaaattgtttaccaagtggaaagctagttctgagaaattattatccagagcctgtgttattttaaagactggacttgcttcaaaggtacccatacgaggagcccaccgtccctgtccctcgaggtcacgtcccaccgctgcactaaggactcacggcccagcgtccacaagactgaggccctgtccctgctcagagaacagatccggagcaggtggtctggtcagtcaggatggaacagtgctacaagcaccagcctgcctctgagcagtgctcggaacagctgaggccgtggcgggctccactaacccccagtgttatcgtgttttatagctgcctttctgtgtcttacacagtttgagagtatatgttaatgactattttttttaaaaatgttctattgaaaccagtgtaacagcacaaagagctctaatgtgtaacacttcctctgaaatggatataaagatgtaaattttataacagcactgtttattctgatgcattctgatgggtcagtgtcgtgtcattaattaataaaggcattttcttccc

SEQ ID NO: 1212 - DNA, 246 bp, Mus musculus
gtttttcagttttgttgctgcctttttgtatcttacacagttcgagagtttatgttaatgactattttttttagaaatgttctattgaaaccagtgtaacagcactaagagtttttatgtgtaacacttcctctgaaatggatataaagatgtaaattttttaacagcactgtttattctgatgcattctgatgggtcagtgtcgtgtcattaattaataaaggcattttcttctcatacagtttc

SEQ ID NO: 1213 - DNA, 400 bp, Mus musculus
cggccgcgccaacatcagaatgcatcagaataaacagtgctgttataaaatttacatctttatatccatttcagaggaagtgttacacattagagctctttgtgctgttacactggtttcaatagaacatttttaaaaaaaatagtcattaacatatactctcaaactgtgtaagacacagaaaggcagctataaaacacgataacactgggggttagtggagcccgccacggcctcagctgttccgagcactgctcagaggcaggctggtgcttgtagcactgttccatcctgactgaccagaccacctgctccggatctgttctctgagcagggacagggcctcagtcttgtggacgctgggccgtgagtccttagtgcagcggtgggacgtgacctc

SEQ ID NO: 1214 - DNA, 4529 bp, Mus musculus
aattcggcacgagcgccgttgtctgcgctgcgctgcgctgcgctggaccagtttcgcgaagttgccggggccctacgccgcccagatgtgcgacctcattgaaccgcagccggccgagaagatcggcaagatgaagaagttgaggagaactttgtccgagagtttcagccgcatcgctctgaagaaagaggacaccacctttgatgagatatgtgtcacaaagatgtctacccggaactgccaggggacagattcagtgatcaagcacctggacacaattcctgaagacaagaaagtcagggttcagaggacgcagagcacttttgacccatttgagaaaccagccaaccaagtcaaaagggtccattctgagaacaatgcatgcattaactttaaatcctcctctgctggcaaagagtcacctaaagttcggcggcactccagccccagctcgccaacgagtcccaaatttggaaaagctgactcatacgaaaaactggaaaaactgggggaaggatcttatgcaacagtgtacaaagggaaaagcaaagtgaatgggaagctggtggctctaaaggtgatccggctgcaggaagaagagggcacacctttcacagccatcagggaagcttccctgttgaaaggactaaagcacgccaacatcgtgttgcttcacgacatcatccacactaaggaaaccctgacccttgtctttgaatacgtgcacactgatttatgtcagtacatggaacagcaccctggaggactccatccagataatgtgaagttgtttttatttcagctgctgcgaggactgtcttacatccaccagcgttatattttgcacagagacctgaaaccgcagaaccttctcatcagcgatacgggggagttgaagctggcagatttcggtctggcaagagcaaaatccgtccctagccacacatactccaatgaagtggttaccttgtggtacagacctccagatgttcttctgggctctacagaatattccacctgccttgacatgtggggagttggctgtatcttcgttgagatgatccaaggagttgctgcgtttccaggaatgaaagacattcaggatcaacttgaacggatatttctggttcttggaacaccgaatgaggacacgtggcctggagttcattctttaccacattttaagccagaacgctttaccgtgtacagctctaaaagccttagacaagcatggaataagctcagctatgtaaatcatgctgaagacttggcctccaagcttctccagtgttccccaaagaacaggctatcagcacaggccgccttgagccatgagtatttcagcgatctgcctccacggctatgggagctgactgatatgtcttctatttttaccgtcccaaatgtgagattgcaaccagaagctggagagagcatgagggcctttggaaaaaacaatagttatgggaaaagcctatcgaacagcaaacactgacaagcccggcactctcaggagagcacaggattaagttgtcatcattctgggaagaagaagaagagataaaaataaatcaatcaataaaaaccactaatgaagtggctcagtgcgagggccctgaatcggttctcttctgcccggtgcagtggatttcactgacatgaaaatggaagctggcaagaacctgtttcctctgcaatttatttaaaaccttgcacgcatttggataccttgtgacttccaagaactacgttacgattaagctttgcttactgctacatggcatgtattcttttccgtcttttgtgtctggttctgtttgcttccccctgccgcacagtgtccatcgcacggtgtctctgtgaagggttttgctgctttcagcagcctcgtcttaagtacattaagacaacacatttggtgttcacacttcctcagccatgtctgcacttgaaagccacacagcggcaggagacaatgtgtgttttccctgagagcagagtgcattctgcaacctccagggaagaacattctttttgctaaaacaaactccatgctttctgacagactagacagcgtggtcccagacagtggggccctacctgttgcctgccttggaggacatttagaaatgtaagggtttttttgttttgttttgtttttcgttttttattggaaatgagcacacatttacacaggagaccaaaatccacttgctatttcaatagcctgactgtttctgagcaggtagagaaataaacatggaaaacaaagacagggtgactgaaggttaataagcattactatcattttttttagcctgtagaaagcaaggcaactttttcatgtgtcttgtccacatcttaccttttcccatcagctctgtattattaaactgttacactctatttttaaactggagaaaatagtagcaaatatcattcttaaaacctgggtacatagaaaaaaaaaaatctgtctgtcagggtaggtcctgaatgcagccttggctgattaaagcttagaaatcacattttataattatccagactttaaaatgtgcttatttacgacaaaggacctttgaatttaattcgatgttcagaaacattccaggccgttcggaaggcatcactgggtaccagacttgaaaccagtcttcagtaacaagtgttcaaaggcagatcttacaagcaatgcaggaattttgctttaagaataaaaatggccaagaaaggcccttgttttaaggacctttgggaccttgcaaagcgtaggcaagtctgctctagcatacattgaaccttgatctggggcagccgcccagtgctggctactttcatggacagcctcactgcagaatcccaggggcagttaggaagctatgtgaagcatgcccttgctcctcctgacataaatccccatggaaacccaacacatctgtgtacggtggtctgtgttttactcctcctgagaaaaaggagacgcaggctacaagcctgaaatgtgacacaattttaggaccaagactagaaatcacaaggctgatttgacaagggctttctgattctccaatgaggggcaagcttccttatactcaaacccagtgtatccctggaagtagacccaggtttccaagtcttcaaaggcactgtgtctgagtaagaggtgtaacccagcccccagcccctccgagcgggtcactcactgcagcctcacaaacactgagaaaggaactgcttacaggatggtttggggaaaaaagcataagatacccaaggtaacaatgtttattcttcactagctgggaatcggtctccatccctcttttgtacattccttccatgggaagtctttacaggtatcttgatttaaagtataattaaattgggagttctttaagtggggagaaaactttatgtgtaattaaaaacagtctccctgtgatttgcttagaatcctccatacatctggggacgggggaagattatgtttgttttcactaagtagaagtcaggagctcacaggaatgctgggagggtttcagtaagaacataaaggcaaccccatgtccttgccctcgtctagacagcttctcctgggaagcaagacataacactgctcagtgtgcggtctgcttcacgacagggacaggcacacctctcaagtttaaagggtttcagtttcctgtccttgtcaccagtgaaggaaatgcaaagtgtctgcccccacccctccacccaacacagtcccccttctctggcttttgctctcctggcctctccaagggtgtcatgaaaatcagtatagactttgtttcattaacatgtcatatgttgagagagcactggaatgtttggtgagtttatttttctatgaacgcgtagcttgagtttggacaactagtaaggaatgcaccaacactttggcatgacaattgtatgaaagcaacctcactgcacaaagtatttggaaaagaagtatgggacttagtttctatcttcttaaggggagccgtttaattaaatacaacatccatgggacaggaaatgtgtttgctataaaattagagatataaggcaggggcagcaatctgcccaccatgcaaggatgaaaatctgtttccagctctcaagtggctaaaagtttccaagagagtccgtgggattataggaaaaccagggcctcttggtaccctgtcctcagagtgtgtgacagccactgtaatcagtgctctatgtatgcgtccatagcagacactcatctgtgaatatcgctgggtttgtaatcttttgttatataagaggatgtttaggctgtacatactggggtagatcattgcctgcccctatacatagaaatatgctgcataattgtgcataacttccttctccgtggctggcttgtagacagaggaaactgtatgttagccttcagtttcctcatataccaaactgaaaacgtttaaatctcaaatgaagtaagcaaggttctgttctcactgcccactttctcagcagcatatattaga

SEQ ID NO: 1215 - DNA, 1928 bp, Mus musculus
ggggcgacgaggctagggaagtttcaagtggaaggtcgtccgccggccggcgcgtcccctcactctcctcccgcagcatcatggcggagccgagcggctcgcctgtgcacgtccagctttcccagcaggcggccccggtgacagcggcggcggcgacggccccggcggccgcgacatcagcaccagccccggccccggccccggctccggcggcgtccgcagccccggccccggctccagctgctgctccagccccggccccggcagctcaggcggtcggctggcccatctgcagggacgcgtacgagctccaggaggttatcggcagcggagcaactgcggtggttcaggcagccctatgcaaacccaggcaagaacgcgtagccataaagcggatcaacttggaaaaatgccagacgagtatggatgaactcctgaaagaaattcaagccatgagccaatgcagccatcccaacgtagtgacttattacacctcctttgtggtcaaagatgagctgtggctggtcatgaaattactaagtggaggttccatgttggatatcatcaaatacatcgttaatcgaggagaacataaaaatggtgtcctagaagaggcgataattgcaacaattcttaaggaggttttggaaggtttagactatctgcacagaaacggtcagatccatagggatttgaaagctggaaatattcttctgggtgaggatggctcagtacaaatagcagattttggagtaagcgcattcttagccacagggggtgatgttacacggaataaagtcagaaaaacatttgttggtaccccatgttggatggcccctgaagtcatggaacaggtgagaggctatgacttcaaggctgatatgtggagttttggaataactgccattgaattagcaaccggagcagcgccttaccacaaataccctccaatgaaagtgctaatgctgactttgcaaaatgacccgcccactttagaaactggtgtagaggataaagaaatgatgaaaaaatacggcaagtccttcagaaagttactgtcactgtgtcttcagaaagatccttccaaaaggcccacagcagcagaacttttaaaatgcaagttcttccagaaagccaagaacagagagtacctgatcgagaagctgctgacaagaaccccagacatagcccaaagagccaagaaggtaaggcgagttcctgggtcgagcggtcaccttcataagactgaagacggcgactgggagtggagcgatgacgagatggatgagaagagcgaggaggggaaggcagccgcctcccaagagaagtcacgaagagtaaaagaagagaactcagagatctcggtgaatgctggtggcatccctgagcaaatacagtctctctctgtgcacgactctcaggcccaaccaaacgctaatgaagactacagagaaggtccttgtgcagtcaaccttgttttaagattaagaaactccagaaaggaacttaatgacatacgatttgagtttactccaggaagagatacagcagacggtgtgtctcaggagctcttctctgctggcttggttgacggccatgatgtagttatagtggctgctaatttacagaagattgtagatgaccccaaagctttaaaaacgttgacatttaagttggcttctggctgcgatgggtcggagattcctgatgaagtgaagctgatcgggttcgcccagttgagtgtgagctgatgtacgccccttgctgtcaccctcatctgtcgtgacccttccctctcccagctccccctttgcctccttcctctcaccccctcactcccaaatcccaacaaataagaagattgtgaagaggctggcttcgatgaagtgcgatcaaaaaaaaataataataataatttaaaaaaaaaa

SEQ ID NO: 1216 - DNA, 374 bp, Mus musculus
  misc_feature (242)..(242): "n" = a, t, g, or c.
tttttttttttttttttggaaaggcacagttttattgcagagtatcagggagggtctcagatccgccccacctccttcagcttggccaccaggtcttctgtggtctccaccttgactcctgctgagcgctgagggggctcttccacactgatcacagagaccttggaggtcaggtccacgcccaggtctccagccttgaccacttcaatcttcttcttcttggctttcatgatgttgggcanggtggcatagcgaggctcattgagccttaggtcagcagtcaccacagcgggcagcttcaggcgaagggtctccagacccccgtcaatttcccgttccacttttaccttgtccccctccagtgtcacctgaga

SEQ ID NO: 1217 - DNA, 234 bp, Mus musculus
taccccatcctccccaacatcttgtaaccccaggaggagtagattgcagtgttcaaccctggagacctagctctggacctgacttccaaggtttctctgatcagtgtggaagacccccatcagccttcagcaggattcaaggtggagaccacagaagacctggtgcccaagctgaaggaggtggggcggatttgagaccatccctgatattttgcaataaaactgtgcctttcc

SEQ ID NO: 1218 - DNA, 432 bp, Mus musculus
tttttttttttttttttacgagtacactaacataaaagttttattgaataaatacatgtgctgttatataaaattaagcaaaaaggacattctatgattaaaacaaacaaacaaacaacaaaaaacaagaaccaccctctattaccctacagtgggtaatccagatgggaccattcactgcagcaggctgcactctctgtatctgcctgaggttttttaaactaatcctaaacacctctgcatagggactgcctgtacaagaaatatagagtgcaaaatacaaatggtagtacatatggttgcaaggctgcttctgttttcacctgaaacttgaaaacacctttgtactttaaggcacaggataagccaccacatgaataagttaggagagctgtacttcaaatcactaatttccctcattggtttggctca

SEQ ID NO: 1219 - DNA, 1892 bp, Mus musculus
acaacggcagtagcaacagccaggggagcaggcttgcagcaagtggcccaaccccttcaagtctagatctgcctgtgacaaccagcttctgggtgaccagtgaccagttcttgccccaggatggggaccgtatccagagcagccttgatcttggcctgcttggctcttgcttctgctgcctctgagggagccttcaaggcttcagaccagcgagagatgacgccagagcgcctcttccagcacctccatgaagtaggttatgcagcacccccttccctaccacaaacccggagactccgagttgaccactctgtaacttctctgcatgaccctcccctctttgaggaacaaagagaagtgcagcccccttcctctccagaagacatccctgtgtacgaggaagactggcccactttcctaaaccctaatgtagataaagctggtcctgctgtccctcaagaagccatccccctgcagaaagagcagccccctccccaagtccatattgaacagaaggaaatagacccgcctgcccagcctcaggaggagattgtccagaaagaggtgaagccacacaccttggcgggccagctccctccagagccccggacttggaatccagcccgtcactgccagcagggacggagaggtgtctggggccaccggctggatggcttccctcctggacggccttctccagacaatctgaagcagatctgccttcctgagcgtcagcatgtgatctacggcccctggaacctgccgcagactggctactctcaccttagtcgccagggagagaccctcaatgtgctggagaccggatactcccgctgctgtccgtgccgcagcgacacaaaccgcctagactgtttgaagcttgtgtgggaggatgcaatgacccaattttgtgaggccgaattctctgtcaagacccgcccccacctgtgctgcagactgcgtggggaggagcgattctcttgcttccagaaggaagctcctcgcccagactacctgctccgaccctgccccgtccaccagaatggcatgtcctcagggccccagttgcctttccccccggggttgcccacaccggacaatgtcaaaaacatctgtctcctgagacgcttccgcgccgtgccacgcaacctcccagctactgacgccatccagaggcagctgcaggctctgactcggctggagacggagttccagcgctgctgccgccagggccacaaccacacttgcacatggaaggcctgggagggtaccctggatggatactgcgagcgggagctggctataaagacccacccccactcgtgctgccactaccctcctagtcctgcccgtgatgagtgcttcgcccacctagctccctatcccaactatgaccgggatatcttgacccttgacctcagccgagtcacccccaacctcatgggccagctctgtggaagtggaagggtccttagcaagcataaacagattccggggctgatccagaatatgaccgtccgctgctgcgagcttccatatccagaacaggcctgctgcggcgaagaggagaaactggccttcatcgagaacctctgtggtccccggaggaattcgtggaaagaccctgccctctgctgtgacctgtctcctgaagataagcaaatcaactgcttcaataccaactacctgaggaacgtggctttagtggctggagacactgggaatgccactggcttgggggagcagggcccaactcggggaacagatgccaaccccgcccctgggtccaaggaagaatgagtcaccctgagcctcagaggattagatgggggaactccgccctactccaccctcctcgaacactcattacaataaatgcctcttggatttgg

SEQ ID NO: 1220 - DNA, 4579 bp, Mus musculus
ggagcaagtggcagtgctgggtgttgggaccgtggctgtcactgcgctggagcatccctgagcttttgaacagagccgactagtcagcagtgcagcagccgcaactccacgccgctctcatctgtctcgtgtctccgctcaggcgatccttcctccgagactccgcacaaagcacattttccaaagcagtgcaagggagcgcccagccgcgtgcaggcggacgcacccttcctgtcctttgttccggggggatctgctgctgctcttctccccaagtcggagtctttcctccaggggtggcgggtcgccgaatacagctacgaagatgccgttggaactgacccagagccgggtacagaagatctgggtgcccgtcgatcaccgaccctcgttgcccagatcctgtgggccgaagctgaccaactccccaaccgtgattgtgatggtggggctcccagcccggggtaagacttacatctccaagaagctgactcgctacctcaactggataggtgttccaacgaaagtgttcaatgtgggagagtatcggcgtgaggctgtgaagcagtacagctcttacaacttcttccgccctgacaatgaggaagccatgagagtccgaaaacagtgtgccttagctgccctgagagatgtcaaaagctacctgacaaaggaaggtggacagattgcagtttttgatgccaccaatacaactagagaaagaaggcacatgatccttaattttgccaaagaaaatgacttcaaggcatttttcatcgagtcggtctgtgacgaccctactgttgtggcctccaacatcatggaagttaaaatctccagcccggattacaaagactgcaactcagcagaagccatggacgacttcatgaagagaatcaattgctatgaagccagctaccagcctcttgaccctgataaatgtgacagggacttgtcactcatcaaagtgattgatgttggccggaggttcttggtgaacagagtgcaggaccacatccagagccgaattgtatactacctgatgaacatccacgtgcagccccgtaccatctacctgtgtcggcatggcgagaatgagtacaacttgcagggcaagattgggggcgactcaagcttgtccagcagaggcaagaagttcgccaatgccctgagcaagttcgtagaagaacagaatctgaaggacctccgtgtgtggaccagccagctgaaaagtaccattcagaccgcggaggccctgaggctcccctacgagcagtggaaggcactcaacgagatcgatgctggtgtgtgtgaggaactaacctatgaggagatcagagatacctaccctgaggagtacgcactgcgtgaacaggacaagtactactatcgctatcccacgggagagtcctaccaggatcttgtccaacgcctggagcctgtgatcatggaattagagcgccaagagaatgtattggtcatctgtcaccaggctgttctacgctgcctactagcctacttcctcgacaagagtgcagaggagatgccatacctgaaatgtccgctccacactgtcctgaaactgacacctgtggcatatgggtgccgggtggagtccatttacttgaatgtagaatcggtgagcacacaccgggagaggtcagaggatgcaaagaagggacctaacccgctcatgcgacgcaatagtgtcaccccactagccagtcccgagcccaccaaaaagcctcgcatcaacagctttgaggagcgtgtggcttccacttctgctgccctgccaagctgcctgcccccggaagtgcccacgcagctgcccggacaaaacatgaagagctcccggagcggtgccgactcttcccagaagcactaaagccgagatgtgggttccattccatttccacagcctgccttgtgcctgctcatcttctcgaggccaagtgatcgcaaggacttctggactcgggagaatggaggtcggcatgttgaagagtagaagcccttccccccactgaaatgttggggtggcaaagacaactaggaagttgtacagatcccagcttcctgtgtagagcagcagaccttcctacgctctgttctctttcgacttccagggctgtctgacctctcaggcccttccaaagcttggggagggctatagttctagaggaggtgagatcagacccctaagtgggggccccggacaccgccacgctgttttgttttgtttctttggatcctggcctggcatgtcgatagtcagaagataagagtggcagggaaccctgagattcagagttagaccccacttgccagaggctcagggacaagttgcacattctcatgtggcttttatgcatcttggcctaggaggaggcctcagagacaagaggcttgggcattgctgcattgggtatgggatttctcctcctgaggaaaccttgagctgaggcctactggtcagctgagcaatgacttgccctgactcctctacaggtccacatgtcttctgggtcccaagttaagggacagactggttgtatcagtggaaggaaggatttttcagaaaaaaataaccagggctcccctcctcccagagtcccttaggccttctgttcttcaccttgggcctggaggcacctgagtagattctgttgttggctgtttgtttgcacttttccttctttctttccttccttccttccttccttccttccttccttcctccctccttccttctcttcttctctccttccttccctccctccccacacctcacttcaagaacctagggtgctggcccttggaggcttgcagcttctgaatgggaggagttggggtgtctttaagatggggagtctaagagccttcaacttcactcccattgttcaagaagggacggtggcccaaggaaggctcatgtcaggccgcctgctcagagctgtccgcatattttggccaagtgtctgctgctgtatgcctcataccaccatgctggccatcttgaggagtcacccccagtgtagaaaagcatccttgtcggctttatggcattggcgacatttttgcatgggttgaaaagtagcgctaatgtctttgtcttcctgtttctcccctttgtccacccatgttctgggggaggacgggacatcccaagcctggaagcaaccaatgggaaactcagcagtgtcagcccaaaggaccctttatgacgatgctgcacaactagggccgaaggtcactctttactttctgcttccttcctgggagtcctagggatcctctcttccccagctcaggggacaacagatcctggggtgacacaggtcatgcttcagacactttaaagtcaccttgtgttttcatagctaactactcaaacatttggcccagcccactaccctttatatctgtggttcaccaggatatagatagatgatagatagaaagatagatagatagatagatagatagatagatagatagatagatagatagatgatagatatctccatctgaagacttggacttttttctctatggcttgagtcttgacaaggatatatgaactgcagacgtgggctgacatgtgtgcaggctgataatatctttggacctgaagatctgcagcgttgatttgggggatggggttgggggtggggtagggaacaggataagaactgtgtagcccaaactagcctcaaactcatggccgtcctcctgtctcagcctctcaaatgttagctgttcgggttataagcatgagccaccaccacaccacgcctggtactatggctttgtacctaaatgtggtttcttcgatgcttcctcctgaccatatccattttatggttatagaaccagcttttacaacatagagactctcaaggctgagacaggtaggggtggtcatgtgtgaccagcctaagtcaatacatcaagagaaagctttgcccaatgtgatttcacattctgtgaacacctatgaataagatcaggcccaggagatcttgatgcgggtggaacatgcatccttcaaaagccagtgacttggtggatggggtgggcagcacccatagaacttccactctcccacccaaaacagcaaaataaaatggggaccaatgtttttaacgttgcatatttgttttgggggtaaatttctcccctttccttcaacaatgggcactacccttgatttatggggagaagaaaaactgttggaaccacaccaatgatattttcatttgtaatacttgaagtttatttttttattattttgatagcagatgtgctatttatttatttaatatgtataagggagcctaaaactagaaagctgtctagattggctttaattgttcattggttcggggcctttcaatgtgtgactgatgacttcttcatgttctgtgtcattgtctctgtccgtgacctaggaagaagctttgcaagctttttaacgggacacgccttcctttcagacatctgtgtagtttgcagttgcaagaacaataaaaacctggttgagatacgaaaaaaaaaaaaaaaaaaaaaaaaaaaa

SEQ ID NO: 1221 - DNA, 537 bp, Mus musculus
ctttacaagcagatgaagcaattgaagactcctctgcacagcatcagcatacctgacagtcatggacacattgataattcactgagacccctgtgggacttggccttcctcggcagctcatacgtgatgtgggagaagacaacccaggtcctgcactattacttggtccagctcagcagtgtggagcggctgaaaacggatgatgacagcatcgactttgacttcactgttctgcttcatgaattctccacacaggaaatcattccctgccgtattcacttggtctggtacccaggtaaaccccttaaagtcaattaccactgtcaagagcagcagagcccagaagaagcctctggaactatggaagcatcagctatggcaccgcagcagttcggtaatttctaaagagaagaaatgatctgcttctattatattctaaacaccacggtggtgctgaactccacgagcatgcgcactttcctgattgggctccctgattgggctcggcaggctcagcacatctaccacatagcagat

SEQ ID NO: 1222 - DNA, 264 bp, Mus musculus
ctgggactcctggggcctcacacccacctcccagctccatttttgctcagtccatcccatctcagcctttaccaggcccctccccaagtgctgctgtgcacactggctcaggccctggagagtaggggggcgagggagtccttcagctgaagcatctgagcaaaacttggtagggcacagtgctgatggggtggggtgggccaagcgctagctgtggaaatagcagcagagaggaaaaagggccctggtggaaggggttggggt

SEQ ID NO: 1223 - DNA, 2779 bp, Mus musculus
tcgtgccaggcaccgccgagatgttgcctaaagttctcctgatgcttctcaacatgttcctggcccttcagtggagggttggacctcatgttaatctggagaataaaccccctgcccaagataaggtagtctttggccctcagcctcagcctgtgccacagcctctaactccgcctgaatctcctgctggagatactgtagtcttcggccctcagccccagccccaggctgaatcccctggccatgatgatgtagtctttagttcccagccccagccgatgcctcagcctcagccgatgcctgagccccagcctcagccggagccggagcctgagccgcagccgcagccacaaccacagccgttggctgggcgccagcctctgccccagcccctgccttggcccatgcctcagccccagccggagccagagcctgagccagagcctgagccagagcctgagcctgagcctgagcctgagcctgagcctgagcctgagcctgagccccaaccagaacctcagcctcagcctctggctggccgtcagcctcttccccaacctctgccttggcccctgccactgcctttgcccgagccccaacctgagcctcagcctgatccccaacccgaacctcagcctgaaccccaacctgagccccaacccgagccccaacctgagccccagaccccaggccaggtccaggctgggcgccaaccccgacccagacctcagcctgagccccagccccagcctgagcctcagcctgagccccagcctgagccacagccacagcctgagcctcagcctgagcccgagccccagccggagcctgagccccagcctgagcctgagcctcagccggagccccagccggagccccagccagaaccgaagccggagcctgagccgcagcctgagcctgagcctcagcccgagccccagcctgagccccagccagaacccaagccggagcctgagccccagccagaacccaagccggagcctgagccccagcctgagcctgagcctgagcctgagcctgagcctcagcccgagcccgagcccaagccggagccccagccggagcctgagcctgagcctgagccggagccggagcctgagccggagcctgagccggagcctgagccggagccggagccggagccggagtcggagtcggagctggacctggagccggaaccggagccccatccccatccccatccccatccccatccccatccggagcccgagccggagccagagccagagccagagccagagccagagccagagccagagccagagccagagccagagccagagccagagatgaaatcagagccccagtcccagctggagcctcaacctagtggaaagaagcttccagcaaaagaaccagaactcactgttgattgcatgactgaacgcccaggtgggaaactgacaagagcttctcgaatccttaacaccatcctgagcaactatgaccataaactgcgccctggcattggagagaagcctactgtggtcactgttgaagtcattgtcaacagcctcgggcctatttccaccccagacatggaatattccattgacatcatcttccaccagacctggtatgatgagcgtcttcgttacaatgacacatttgaaacccttattctgcatggcaacgtggtgagccagttgtggatcccggataccttttttaggaattctaagaggacccaagagtatgatatcaccatacctaaccagatggctctcatccacaaggatggaaaggtgttgtactcagttaggatgaccattgatgcaagatgctcactccacatgctcaattttccaatggattctcactcttgccctctgtctttctctagcttttcctatgatgacagtgaaatgatctacaaatgggagaatttcaagctcgaaatcaatgcgaagaacacttggaagctattggaatttgattttacaggcgtgaacaacaaaactgaaatcatctctaccccatttggtgacttcatggtcatgacattcttcttcaatgtaagcaggcggtttggcttcattgtctttcaaaattatgttccttcttctgtcaccacaatgctctcctgggtctccttctggatcaagatagaagctgctgctgccagggcctctgtaggggtcagttctgtgctcaccatggccacgctgggtaccttgtcctgtaagaatttccctcgtgtctcctatctcacggctttggacttctatattgcaatttgtttcgtcttgtgcttctgcactctgctagagtttgctgtgctcaacttcctgacctacaataatattaaacgacaggcttctctaaaggtctaccaacttccaaccaatagccgtgctaatgcacatactcgtgctcgtgcacgcacccgcgctcgtgctcgtgcccgtgcacgacagcagcaggaagtgtttgtgtgtgagattgtcacctatgaggaaaatgctgaagaggggtatcaatggtctccaagatcaagaagacctcagtgtccctggaggcggtgtggcagaagctatgtgtgcttcagggttctcaggaagtatttctgcatggctcctggttgtgagggaggcagctggcagcggggccgcatctgcatccatgtttatcgtctggataactattcgcgggtgctttttcccattacattcttcttctttaatgtgctctactggctgatttgccttaacctgtaggctccagccagtagctcatg

SEQ ID NO: 1224 - DNA, 1861 bp, Mus musculus
cactgaaggagcctgcagcgctcaccgtcaggaaggcaaaccacagcccaggaagccctgaggtcacttggtcgctctcctcaagaccatggatgtgcacttgtttgactatgcagagcctggcaactactctgacatcaactggccatgtaacagcagcgactgcattgtggtggacactgtgcagtgtcccaccatgcctaacaagaacgtgcttctgtataccctctccttcatctacattttcatcttcgtgatcggcatgattgccaactctgtggtggtctgggtgaatatccaggctaagaccacaggctacgacacgcactgctacatcttgaacctggccattgcagacctgtgggtcgtcatcaccacccccgtctgggtggtcagtctcgtgcagcataaccagtggcccatgggggagctcacatgcaagatcacacacctcattttctccatcaacctctttgggagcatcttcttcctcgcctgcatgagcgtggaccgctatctctccatcacctacttcaccggcacctccagctataagaagaagatggtacgccgtgttgtatgcatcttggtgtggctgctggccttctttgtgtccctgcctgatacctactacctgaaggcggtcacatctgcttccaacaatgagacctactgcaggtccttctaccccgagcacagcatcaaggagtggctgatcggcatggagctggtctctgtcatcttgggctttgctgtccccttcactatcattgcgatcttctacttcctgctcgctagagccatgtcagcatcaggcgaccaggagaagcacagtagccggaagatcatcttctcctacgtggtggtcttcctggtatgttggctgccgtaccattttgtggttctgctggacatcttctccatcttacactacatcccgtttacctgtcagctggagaatgtgctctttacagcgttgcatgtcacccagtgcctgtccttggtgcactgctgtgtcaaccccgtgctctatagcttcatcaaccgcaactacaggtacgagctgatgaaggccttcatcttcaagtactcggccaaaacaggtctcaccaagctcattgatgcctccagagtgtcagagacagagtactctgccctggaacagaacaccaagtgatccatcattctgcagaggtcggggggacacgtgcatgttgcaaatggggcggctgggtcctgtggtttcttcaagaaagcaatgtagctttgggtctggttgcttgagtggtatgaagaggagaaagcatgtgaccatgcttcctgtctctcattctccagccaagatggctgccgcctggatgcccatcctgacagctggcagctggcagcaggcagggctgtgctgtgctgtgctgtgctgcgctgtgctgtgctgtgcagccagagctgcgtatcaaagccagcaccaggacaggctcttatggacatgtgtacagtagaatcttctgtgtttcttcaagtttttacttggtgactttttgtatttaagttttaagactttattttctcactatggatgtaccttataaatgtatttgaaagctaaatatattttaaatattgtatgggaggtgtaaggctgttgtattcagaccatgtaggcctcagattagctggacttgagttttgactaaggatgacattaattgttagctgatttgaaattatatatataaatataaaaatatatataaatttatgccagtctcggctgaaaggttttatttacaatagttttatatctgtgcaatgtttaatgctggcacagcatatgaaacaacaactgcccagcaatgcagtt

SEQ ID NO: 1225 - DNA, 798 bp, Mus musculus
cgagacgctgccggccggtggaaccaatgagaactccgctgctaccgctggcgcgctcagtgctgttgctgctggtcttaggctcaggccattatgcagctgctttggagctcaatgaccccagctcagggaaaggcgaatcgctttctggggaccacagtgccggtggacttgagctttctgtgggaagagaggtttccaccataagcgaaatgccttctggcagtgaactctccacaggggactacgactactcagaggagtatgataatgaaccacaaatatccggctatattatagatgattcagtcagagttgaacaggtgattaagcccaagaaaaacaagacagaaggagaaaagtctacagaaaaacccaaaaggaagaaaaagggaggcaaaaatggaaaaggcagaaggaataagaagaaaaagaatccatgcactgccaagtttcagaacttttgcattcatggcgaatgcagatacatcgagaacctggaggtggtgacatgcaattgtcatcaagattactttggtgaacggtgtggagaaaaatccatgaagactcacagcgaggatgacaaggacctatccaagattgcagtagtagctgtcactatctttgtctctgccatcatcctcgcagctattggcatcggcatcgttatcacagtgcacctttggaaacgatacttcagggaatatgaaggagaaacagaagaaagaaggaggcttcgacaagaaaatgggactgtgcacgccattgcctagctgaggacaatgcagggtaaaagtt

SEQ ID NO: 1226 - DNA, 970 bp, Mus musculus
gacttgggcccggcagaatggctcccgcaaagaagggtggcgagaagaagaagggccgttctgccatcaacgaggtggtgacccgagaatacaccatcaacattcacaagcgcatccatggagtgggcttcaagaagcgtgctcctcgggcactcaaagaaattcggaagtttgccatgaaggaaatggggacaccagatgtgcgcattgacaccaggctcaataaagccgtctgggccaagggaataaggaacgttccatatcgcatccgagtacgcttgtccagaaaacgtaatgaggatgaggattccccaaacaagctctacacgctggtaacttacgtgcctgttaccacattcaaaaatctacagacggtcaacgtggatgagaactaacctgctcgtgtcaaataaagttgcagaactgccttcagggtttggttttcctttctgttgtctgcctcatgggtggaatttttgggtctacagggtgttggaaattaatctgagaatctctgttctgggtacatgggaaattagaaatacgtgaaacattcttttcacagaagtcactttattaggattgtggatttgggttggttttgaaacagggtttcttgtggcactgcttgttctatagaatagggtggccttgaactcagaaatccacctgccttttcctccctagtattggcaattaaatgcccagcttgtttgtaagctctcattttcagttccaggtttatgtgtgagcctaagattaggtaaagattgaggttataacttaaacgtactgaattaacttatgttgtgtgggtcccaggaattggacctgggacatcaactctgcctttccagccatctttgccaaccagtagctcatctctgggatgtgtctgccctcaaaatgacattttaaaaaagtcagtacaaaagaacgatttttattaaaaaccttgaggacaaacatc

SEQ ID NO: 1227 - DNA, 2305 bp, Mus musculus
atcgcaggaggccgacactgtgactcctggtggatcgggactggggagtcagagtcaagccctgactggttgcaggcgctcggagtcagcatggaaagtctctgcggggtcctgggatttctgctgctggctgcaggactgcctctccaggctgccaagcgatttcgtgatgtgctgggccatgaacagtatcccgatcacatgagagagcacaaccaattacgtggctggtcttcggatgaaaatgaatgggatgaacacctgtatccagtgtggaggaggggagacggcaggtggaaggactcctgggaaggaggccgtgtgcaggcagtcctgaccagtgactcaccggctctggtgggttccaatatcacttttgtggtgaacctggtgttccccagatgccagaaggaagatgctaatggcaatatcgtctatgagaagaactgcaggaatgatttgggactgacatctgacctgcatgtctacaactggactgcaggggcagatgatggtgactgggaagatggcaccagccgaagccagcatctcaggttcccggacaggaggcccttccctcgcccccatggatggaagaaatggagctttgtctacgtctttcacacacttggccagtatttccaaaaactgggtcggtgttcagcacgggtttctataaacacagtcaacttgacagctggccctcaggtcatggaagtgactgtctttcgaagatacggccgggcatacattcccatctcgaaggtgaaagatgtgtatgtgataacagatcagatccctgtattcgtgaccatgtcccagaagaatgacaggaacttgtctgatgagatcttcctcagagacctccccatcgtcttcgatgtcctcattcatgatcccagccacttcctcaacgactctgccatttcctacaagtggaactttggggacaacactggcctgtttgtctccaacaatcacactttgaatcacacttatgtgctcaatggaaccttcaaccttaacctcaccgtgcaaactgcagtgcccgggccatgccctcccccttcgccttcgactccgccttcaccttcaactccgcccttaccttcgccctcacctttgcccacattatcaacacctagcccctctttaatgcctactggttacaaatccatggagctgagtgacatttccaatgaaaactgccgaataaacagatatggctacttcagagccaccatcacaattgtagaggggatcctggaagtcagcatcatgcagatagcagatgtccccatgcccacaccgcagcctgccaactccctgatggacttcactgtgacctgcaaaggggccacccccatggaagcctgtacgatcatctccgaccccacctgccagatcgcccagaaccgggtctgcagccctgtggctgtggatgggctgtgcctgctgtctgtgagaagagccttcaatgggtctggcacctactgtgtgaatttcactctgggagatgatgcaagcctggccctcaccagcaccctgatctctatccctggcaaagacccagactcccctctgagagcagtgaatggtgtcctgatctccatcggctgcctggctgtgcttgtcaccatggttaccatcttgctgtacaaaaaacacaaggcgtacaagccaataggaaactgccccaggaacacggtcaagggcaagggcctgagtgttctcctcagtcacgcgaaagccccgttcttccgaggagaccaggagaaggatccattgctccaggacaagccaaggacactctaagtctttggccttccctctgaccaggaacccactcttctgtgcatgtatgtgagctgtgcagaagtatgtggctgggaactgttgttctctaaggattattgtaaaatgtatatcgtggcttagggagtgtggttaaatagcattttagagaagacatgggaagacttagtgtttcttcccatctgtattgtggtttttacactgttcgtggggtggacacgctgtgtctgaaggggaggtggggtcactgctacttaaggtcctaggttaactgggggagataccacagatgccttcagctttccacataacatgggcatgaacccagctaatcaccacctgaaggccatgcttcatctgccttccaactcactgagcatgcctgagctcctgacaaaattataatgggcccgggcttttgtgtatgggtgccgtgtggtgtacatattctactcattaaaaaaggcagtctaaaaaaaaaaaaaaaaaa

SEQ ID NO: 1228 - DNA, 7943 bp, Mus musculus
cgtgcccggagccctgggaaagagggaggagggaggagggagggtcgtggccggccgccatggggctgggggcccggggccgccgccgccgtcgtcgcctgatggccttgccaccgccaccaccgcccatgcgggcgctgcccctgctgctgctgctagcggggctgggggctgcagcacccccttgtctggatggaagcccatgtgcaaatggaggtcggtgcacccaccagcagccctccctggaggctgcttgcctgtgcctgccaggctgggtgggtgagcggtgccagctggaagacccttgccactcaggcccttgtgctggccgaggcgtttgccagagttcagtggtggcgggcaccgcccgattctcctgtcgttgtctccgtggcttccaaggcccagactgctcccagccagacccctgcgtcagcaggccctgtgttcatggtgccccctgctcagtggggccggatggccgatttgcctgtgcctgcccacctggctaccagggtcaaagctgccaaagtgacatagatgagtgccgatctggtacaacttgccgtcatggtggtacctgtctcaatacacctggatccttccgctgccagtgtcctcttggttatacagggctgctgtgtgagaaccccgtagtgccctgtgccccttccccgtgtcgtaatggtggcacctgtaggcagagcagtgatgtcacatatgactgtgcttgccttcctggcttcgagggccagaactgtgaagtcaacgtggatgactgtcctggacatcggtgtctcaatgggggaacgtgtgtagacggtgtcaatacttacaactgccagtgccctccggagtggacaggccagttctgtacagaagatgtggatgagtgtcagctgcagcccaatgcctgccacaatgggggtacctgcttcaacctactgggtggccacagctgtgtatgtgtcaatggctggacgggtgagagctgcagtcagaatatcgatgactgtgctacagccgtgtgtttccatggggccacctgccatgaccgtgtggcctctttctactgtgcctgccctatggggaagacaggcctcttgtgtcatctggatgatgcatgtgtcagcaacccctgccatgaggatgctatctgtgacacaaaccctgtgagtggccgggccatctgcacctgcccacctggcttcactggaggggcatgtgaccaggatgtggatgagtgctcgattggtgccaacccctgtgaacatttgggtcggtgtgtgaatacacagggctcattcttgtgccaatgtggccgtggctatactggacctcgctgtgagactgatgtcaatgagtgtctctccgggccctgccgcaaccaggccacgtgtcttgaccgaattggccagtttacttgcatctgcatggcaggcttcacagggacctactgtgaggtggacatcgacgaatgtcagagcagcccatgtgtcaatggtggtgtctgcaaggacagagtcaatggcttcagctgcacctgcccatcaggattcagtgggtccatgtgtcagctggatgtggatgagtgtgcaagcactccctgccggaatggtgccaagtgtgtggaccagcctgacggctatgagtgtcgctgtgcagagggctttgagggcactttgtgtgagcgaaacgtggatgactgctctccggatccctgccaccacgggcgctgtgtcgatggcattgctagcttctcgtgtgcttgtgccccaggctatacgggcatacgctgtgagagccaggtggatgagtgccgcagccagccctgtcgatatgggggcaaatgtctagacttggtggacaagtacctctgccgttgtcctcccggaaccacaggtgtgaactgtgaagtcaacattgatgactgtgccagtaacccctgtacctttggagtttgccgtgatggcatcaaccgttatgactgtgtctgtcagcctggattcacagggcccctctgcaacgtggagatcaatgagtgtgcatccagcccatgtggagagggtggctcctgtgtggatggggaaaatggcttccactgcctctgtccacctggctccctgcctccactttgcctacctgcgaaccatccctgtgcccacaagccctgtagtcatggagtctgccatgatgcaccaggcgggttccgctgtgtttgtgagcccgggtggagtggccctcgctgtagccagagcctggctccagatgcctgtgagtcccagccctgccaggctggtggcacctgcaccagtgatggaataggctttcgctgcacctgtgcccctggattccagggccatcagtgtgaggtgctgtccccctgtactccaagcctctgtgagcacggaggccactgtgagtctgaccctgaccggctgactgtctgttcctgtcccccaggctggcaaggcccacgatgccagcaggatgtggatgaatgtgccggtgcctcaccctgcggcccccatggtacctgcaccaacctgccagggaatttcaggtgcatctgccacaggggatacactggccccttctgtgatcaagacattgacgactgtgaccccaacccgtgcctccatggtggctcctgccaggatggcgtgggctccttttcctgttcttgcctcgacggctttgctggtcctcgctgtgcccgagatgtggacgaatgtctgagcagcccctgtggccctggcacctgtactgatcacgtggcctccttcacctgtgcctgtccacctggttatggaggcttccactgtgagattgacttgccggactgcagccccagttcctgcttcaatggagggacctgtgtggatggcgtgagctccttcagctgtctgtgtcgccccggctacacaggcacacactgccaatacgaggctgacccctgcttttcccggccctgtctgcacgggggcatctgcaaccccacccacccaggatttgaatgcacctgccgggagggcttcactgggagtcagtgtcagaacccagtggactggtgcagccaggcaccctgtcagaatgggggtcgctgtgtccagactggggcttactgcatttgtccacctggatggagtggccgcctgtgcgacatacaaagcctgccctgcacggaggccgcagcccagatgggggtgaggttggagcagctgtgtcaggaaggtggaaagtgcatagacaagggccgctcccactactgtgtgtgtccagagggccgtacgggtagtcactgtgaacacgaggtggatccctgcacggcccagccttgccagcacgggggcacttgccgtggttacatggggggctatgtgtgtgagtgtccagctggctatgctggtgacagttgtgaggataatatagatgagtgtgcttcccagccctgccagaacggaggctcctgtatcgatcttgtggcccgctatctctgttcctgtccccctggcacactgggagttctctgtgagatcaatgaggacgactgtgacctaggcccatccttggactcaggcgttcagtgcctacacaatggcacctgtgtggacctggtgggtggcttccgctgtaactgtcccccaggatacacaggtctgcactgtgaggcagacatcaatgagtgtcgcccgggtgcctgccatgcagcgcatactcgggactgcctacaagatccaggtgggcatttccgctgcgtctgccatcctggcttcacagggcctcgctgtcagattgctctgtccccctgtgagtcccagccatgtcagcatggaggccagtgccgtcacagcctaggccgtggaggtgggctgaccttcacctgtcactgtgtcccgccattctggggtctgcgttgtgagcgggtggcacgctcttgccgagagctgcagtgcccagtgggtatcccatgccagcagacagcccgtggaccacgctgcgcttgtcctccggggctgtccgggccctcctgccgggtttctagggcgtcaccctcaggagctactaacgccagctgcgcctctgccccttgtctgcatgggggctcatgcctacctgtacagagtgtccctttcttccgctgtgtgtgcgctccgggctggggcggcccgcgttgtgagaccccttccgcagcccctgaggtccccgaggagccacggtgcccgcgagcggcttgccaggccaagcgaggggaccagaactgcgatcgtgagtgcaacaccccaggctgtggctgggatggcggtgactgctcactgaacgtggacgacccctggaggcagtgtgaggcactgcagtgctggcgtctcttcaacaacagccggtgtgacccggcctgcagctctccagcctgcctctatgacaactttgactgctactctggtggccgcgaccgcacctgcaaccctgtttatgagaagtactgcgccgaccactttgcagatggccgttgtgaccagggctgcaacactgaggaatgtggctgggatgggctggactgtgccagcgaggtcccggcccttttggcccgaggggttctggtcctcacagttcttctgcctcctgaagagttgctgcgctccagtgccgactttctgcagcgactcagcgctattctgcgcacctcactgcgcttccgcttggacgcacgtgggcaggccatggtcttcccctatcaccggccaagccctggctctgaatcccgggtccgtcgtgagctgggtcctgaggtgatcggctctgtggtgatgctggagattgacaaccggctctgtctgcagtcagctgagaatgaccactgcttccctgatgctcagagtgctgctgactacttgggagccttgtcagcagtggagcgacttgatttcccatacccacttcgggatgtgcgaggagagccgctggaggccccagagcagagcgtgccactgctgccactgctggtggcaggggctgtctttctactcatcatcttcatcctgggtgtcatggttgccaggcgaaagcgagaacacagcaccctctggttccctgagggttttgcattacacaaggacatagctgctggccacaagggccggagggagcctgtgggacaagatgcactgggaatgaagaacatggccaagggtgagagtctgatgggggaggtggtcacagacttgaatgactcagaatgtccagaggccaagagactgaaggtagaggagccgggcatgggtgcagaggagcctgaggactgtcgccagtggacccaacaccacctggttgctgctgatatccgtgtggcaccagccacagcgctgactcctcctcagggagatgcagatgcagacggagtggatgtcaacgtccgagggcctgatggcttcaccccacttatgctggcctccttctgtgggggagccctggagccgatgccagctgaggaggatgaggcggatgacacatcagccagcattatctcagatctgatctgtcaaggggcccagctcggggcacggactgaccgcactggcgagaccgccctgcatttggctgcccgctatgctagagcggatgcagccaagcgtctcctggatgctggggcggacaccaatgcccaggatcattcgggccgcacccctctgcacaccgcagtgacagctgatgcccagggtgtcttccagattctcatcaggaaccgctccactgacctggatgcccgaatggcagatggctctactgcactgatcctggcagcccgcctggcagtggagggcatggtggaagagctcatcgccagccatgccgatgtcaatgcagtggatgagcttgggaaatctgccttacactgggctgcagctgtgaacaacgtggaggctaccttggctctgctgaaaaatggagccaacaaggacatgcaggacagcaaggaagagacgccgctgttcttggccgctcgggagggcagctatgaggctgccaagctgctgctggatcatctcgccaaccgggagatcacagatcacttggacaggctgccccgggacgtggcccaggagcggctgcaccaggacattgtgcggttgctggaccagcccagtggacctcgaagtccctctggtccccatggcttagggccattgctctgcccaccaggggccttccttcctggcctcaaagcggtgcagtctgggaccaagaagagcaggaggccacctggcaagaccgggctggggccacagggaactcgtggtcggggcaagaagctgacactagcctgtccaggacctctggcagacagctctgtcacactgtcaccggtggactctctggactcaccacggcctttcagtgggccccctgcttcccctggaggcttccccttggagggcccctatgccaccacggccaccgcggtgtccttggcacagctaggcgcaagtagggcgggtcctctggggcgccagcctcctgggggctgtgtgctcagctttggtctgctcaatcctgtagctgttcccctcgactgggccaggctgcctccacctgcccctccagggccctcattcctgctgcccctggctccgggaccccagttgctcaacccaggagccccagtttctccccaagagcggcccccaccctacctggctgctccaggacatggagaggaatatcctgcagcaggaacccgcagtagccccaccaaggcccgcttcctgcgggttcccagcgagcatccttatttgaccccgtctcctgagtccccagagcactgggccagcccatcccccccatccctctcagactggtctgactcaacacctagcccagcaactgctaccaatgccacagcctctggagccctgcctgctcagccacaccccatatctgttccctccctccctcagtcccagactcagctgggaccccaaccagaagttacccccaagaggcaggtgatggcctaagttcttggatttgaggggtgctgaagtgacactcctctatgacttctttcttcctcctttttaatcttactctcatccctttctctctgtcccagccttcctgcacctctctgtcttgtagtgtgaccaagttggtcaccagcccagacccccagtcttcctttatttataatgggtaggggctgaccttccaccaccttggccccctaagggatctgggacctccttttgatccctctccctgcctcaacttcctccccccccgctttctgcttctcattgtctcacactctgacaagagtgagttattatttttttcttttttacattttgtatagagacaaattcatttaaacaaacttattattattattattttttacaaaatatatatatggagttgctcccttccccccgctgcaaattcctccagcgcccccgtggggctgagtctgtgggcccgtttggccaatccggactctgtgtactgagtacacagatatgactagggctccacgtactgagtatgtggccctcgtatgtaccaagtagccagccttgggcacaccctcccctggggtcaggggacatttgggagcctccttcccctccccattccccttcctcacttcactgcattccagataagacgtgtagactcactgggaaaggggtcttgtctgctcaaagcctcaactccaggctcacctcccagagcctggctcaccttttagggcctggggtgggggggcacgtcaggggagatgtattttgtatgcattccacttctaattgtaaatacagggcagaaggtgggagtggctctccctcttcctgttgttctcttggctcagcctgcctaatagaaatgtttttaggctgtttttgtaatatggcacctggtcacagtcctttgtagctgaattc

SEQ ID NO: 1229 - DNA, 1101 bp, Mus musculus
atgttcaacgtcaccacacaagtcctcgggtctgctcttaacgggaccctttcgaaggacaactgcccagacaccgagtggtggagttggctcaatgccatccaggcccccttcctctgggtcctcttcctgctggccgcactggagaacctctttgtcctcagcgtgttcttcctgcacaaaaacagctgcactgtggccgagatctacctgggcaacctggcagcggcggacctcatcctggcctgcgggttacctttctgggccatcaccatcgccaataactttgactgggtgtttggagaggtgttgtgccgggtggtgaacaccatgatctacatgaacctgtacagcagcatctgcttcctgatgctcgtgagtatcgaccgctacctggcgctggtgaagaccatgtccatgggccggatgcgcggggtgcgctgggccaaactctacagcctggtgatctggggctgtacactgcttctgagttcacccatgttggtgttcaggaccatgagggaatacagcgaagagggccacaatgtcaccgcctgcgtcatcgtctacccgtcccgttcctgggaggtgttcaccaacgtgctgctgaacctggtgggtttcctcctgcccctgagcgtcatcaccttctgcacggtgcgcatcttgcaggtgctgaggaacaacgagatgaagaagttcaaggaggtccagacggagaggaaggccaccgtgctagtgctggccgtcctggggctctttgtgctgtgttgggtgcctttccagatcagcaccttcctggacacgctgctggccctcggcgtgctgtccggatgctgggacgagcacgccgtagacgtcatcacgcagatcagttcctacgtggcctacagcaacagcggcctcaacccactggtgtacgtgatcgtgggcaagcgcttccggaagaagtcccgagaggtgtaccgggtgctgtgccagaaaggaggctgcatgggagaacccgtccagatggagaactccatggggactttgagaacctcgatctccgtggaacggcagatccacaagctgcaggactgggcagggaagaaacagtga

SEQ ID NO: 1230 - DNA, 3175 bp, Mus musculus
gcggccgcgtcgacccggggcgggcggagcgagcggcgggaggagcgagcggtgggaggcgcgcgagcgggcggctggcagcgtctccgccggcatctgcgcggccgcctctgcccggagcccggggaccgagcgccggacccgccgcctggcgcaccgacgcggagctcccgctttgtgctccgtgccggttcgaggaggcttccggaggctgcggccaccgcgccccggcggcctcggaggcccgcggctggaggtgccggagctgctcggtccgcgcggctgagccccgcgtgccccactgctcgccgggctgctccgagccggggtgctccggggctccaaactcgggctggcggggcaagtgttcttcactgaacccagaggatgtccgggaagcactacaagggtcctgaagtcagttgttgcatcaaatacttcatttttggcttcaatgtcatattttggtttttgggaataacgtttcttggaatcggactgtgggcgtggaatgaaaaaggtgtcctctccaacatctcgtccatcaccgacctcggtggctttgacccagtgtggcttttccttgtggtgggaggagtgatgttcattctggggtttgcagggtgcatcggagcacttcgggaaaacacctttcttctcaagtttttttctgtgttcctggggattattttcttcctggaactcactgctggggtgttggcatttgttttcaaagactggatcaaagaccagctgtatttctttattaacaacaacatcagagcctacagagatgacattgatctacagaacctcatagacttcacccaggaatattggcagtgctgtggggcttttggagctgatgattggaacctaaatatttacttcaattgcacagattccaatgcaagccgagagcgatgcggtgtgccattttcctgctgcactaaagaccccgcggaagatgtcatcaacactcagtgtggctatgatgccaggcagaaaccagaagttgaccaacagattgtaatctacacaaaaggctgtgtgccccagtttgagaagtggctacaggacaatttaaccatcgtggctggtattttcataggcattgcattgctacagatttttgggatatgcctggcacagaatttggtgagtgacattgaagctgtcagggctagctggtagacccctgcgaccactgctgtcagacactggactgatcccccctcactgactgaccctctgtgcgccggccggctgatggcgggctgtagaggcctggtcacaggcctacagtctcacctgatggagctgccaagaacttaactttctgtgggggtagaactgggaaatgctgctcacagacggaacttggaaaaagaaaaacaaaacaagtgcgcaacttgctgagtcaacgtgcagtgaatctctactgtagccgtggattggtggtcggatggatgctaccagaagggggaaggggggaggttgggcacggcatgtacttgaattttggagaatacagtgctgtacacatcttggctaaaacttgggcccttagccgtcagggccaggtgtcttgaaatctctcaaaccctttgcatctgtcctccagagaagaaaccagctgccccctgtgttcagattctgagagaggtggagcgggtcacgatacagcatgcgcccttcatcctgagtttgcccttaagagaactgggcgtttgcagtaaactagggtgccagaggctgagctccacatttccacaggactgctctttcctctgagtggccagcccgagcctgagctctgtcaatgacatccaaggagaaaatgaggttaatgagagacattaattaaacactccctcaccccaccgcaccaaaccagttgggttcttctgatattctggaatactctgggctatgttttatgttttatttcttttttaatcggttgttattttggttctttttttttttctttctttcttttttctttttgtctcccaaaggaggctatgacacagttctcttggtttcttattcagcttgaatagtaagtttttgtagacttgtcacctgcatgtactgtaaccccacccccacccccaaatccaccatgttcttttcagagagacatttgagcgtgttccttagtgtttatgtcctaggtatccagccttgagtggttgtggagtgttgtcctagccgcatctttgtatgcccctcaggctctctgtctctcctggcatccaattcagcttctgtccattcgccattgagtggtagaaaagcccagctccaaagcagggttgacacagtcaaaaagcatttcatgaggtttttctttcttttctttttcctccctttttgcaactttagttttgtcgtatattaaataaaaaaccaagcctagtatagtgcatgtgctcgctgaggtgacctcggggtggttacaaagcacaaatatttgaggggctgcgccgaagcccagccagggttcagtgacgctaggtggaaaaccaccttcaggttcttctcctgcctcgtgcccactgggagggtggactttagccccagatccccccacccccagcttgtgataacccctggatgttgctttcacggggagcagatttagtttgtgggtttgctgggaaggccccagcctctgcgaaaagcagctccccattggccagccagcagtctgcgtcatgcagcccggttttccatttccgcagcacgtgtgcgttgccgtggctgatgggcgctgtctgctcagagggaggtcaggcactccttgggtttacgtggctctgcatgtttgtatcggtgtctgtttttaggtagagatagtcattaccatacgtggatgcgaggtcacgtgacttcacccctgtccataccacagccgtcgcttgtgatgtccttcaacatggacactcgtgctctcggattggcacttctgtcttctttattacctcattctccagtgaactgcatctggccaattgattcagaatcagacaggatccccaccccgtggcacatccagtgaaagccaaaacacaagcccaagcgagttttaaattttaatcaccctttattttttacactcgagagtgattgtaataaaagctgtcattaataaactcggttctacctc

SEQ ID NO: 1231 - DNA, 1282 bp, Mus musculus
caactctgaagcaggacctttactgaaatcctggtgatctaccctggttacttcctctcttgaaaatgttttgcggggaatatgtccaaggaaccatcttcccagctccaaatttcaatcccatgatggatgcccaaatgctaggcggacgactccaaggatttgactgcaacaaagacatgctgattgacatcctaacacaacgcagcaatgcacagcggcagatgatagctgggacctatcagagcatgtatggccgggacctgatttcagttctgaaggaacaactttcatctcacttcaaagaagtgatggtgggcctgatgtatcctccaccatcttatgatgctcatgagctctggcatgccatgaagggaccaggaactgatgagaattgcctcattgaaatattagcttcaagaacaaatggggagattttccagatgcgagaagcctactgtttacagtacagcaataaccttcaagaggacatttactcagaaacctcaggacacttcagggatactctcatgaacttggtccaggcaaacagggaggaaggatactctgatcctgcaatggctgctcaggatgcaatggtgctgtgggaagcctgccagcagaagactggggaacataaaaccatgatgcagatgatcctgtgcaacaagagctacccacaacttcggctggttttccaggaatttcaaaatatttctggccaagacatggtggatgccatcaatgactgtaccgatggttatttccaggagctgctggttgctattgttcgttgtatccaggacaaaccaagctattttgcttataaattatacagggcaatccatgattttggcttccataacaaaactgtcatcaggattctcatcgccagaagtgaaatagacctaatgaccataaggaaacgttacaaagagagatttggaaaatccctctttcatgatatcaaaaattttgcttcagggcactatgagaaagcactacttgccatctgtgctggtgatgtggaagactactgaaaagagggagagtttgaaggtgatgcgatcttctttataggcacccgacatagactgctgaacgcgtgctgtattcacactgaacagaactataaaatcaaatttttcttctatctctacaattattctgagacaaaaatctcctctgttggaaatgtgtaatcctagatttgtagcccttattcaattagtaatcaattaaactgtatatggtagaataagaaaaaaaaaaaaaaaaaaaa

SEQ ID NO: 1232 - DNA, 305 bp, Mus musculus
ctctctggagtctgagtgccctttctaccagccatgaggactctctgctctctgctgctgatatgctgcctccttttctcatataccactccagctgttggaagtttaaaaagtattggatacgaagcagaacttgaccactgccacaccaatggagggtactgtgtcagagccatttgtcctccttctgccaggcgtcctgggagctgtttcccagagaagaacccctgttgcaagtacatgaaatgattagaaggaagcacatggaagtcaagtgacagatgtgtaattgatgtttcaataaa

SEQ ID NO: 1233 - DNA, 1385 bp, Mus musculus
  misc_feature (50)..(50): "n" = a, t, g, or c.
cttgggctgcagccccttgcgggccttcctgctgcaacgcgcgctggagnacgcacggcttggcgggaaggcgagggcactgtgcggagcctccggtgctggcggcggccacgagtggagcccgggtccggccgcagcacgcggaacagagcagaaggtggcggggtccggcgaagccacgatgaagccgagcagcgaggaagagggagagttggtgcagggcgtgggcccctgggacgagtgcttcgaggtggccgtgcagttggcgctgcgtgcgggacaaatcatcaggaaggccctgacagaggaaaaacgcgtctctacaaaaacatctgctgccgatcttgtgacagaaacagatcaccgagtagaagatttaattgtttctgagttgcgaaagcggtttccttcacacaggttcattgcagaagaggccacagcctccggggccaagtgtgtgctcacccacagcccgacctggatcatcgaccccatcgacggcacctgcaactttgtgcacaggttccccactgtggcagttagcatcggatttgctgttcaccaggagctggaatttggagtgattcaccactgcacagaggagcggctgtacaccggcaggaggggccaaggcgccttttgcaatggccagcggcttcaggtctccagggagacagatctcgcaaaggccttggttctgacagaaatcgggcccaaacgcgaccccgatactctgaaagtattcctgagcaacatggagcggctgctgcacgccaaggctcatggggtccgagtgattggcagctccaccttggccctctgttacctggcctcaggtgcagccgacgcctattatcagtttggccttcactgctgggacctggcagctgccacagtcatcattagagaagcaggcggcattgtgattgacacctcaggtggaccccttgacctcatgtcgtgcagagtcgtagctgctggcaccagagagatggcagtgctcatagctcaggccctacaaactattaactacggccgagacgatgagaagtgagccacacacagctcgaaggctaaaaacgcagcagcaacctgggaaagagctgtcccggtggcttaagttccaggacagtctaccatagctctccctgggccttgcctcggtgcttagctgattctctctaatctcgtgtagccccttttcaggtcggtacgtgttcttttcatcagagccaaacccagatcttgtgaggggtgtgttagtcatccatcctgattgtttttccagaatgcaaatctcaggtgatacagctttagaacgggctctcaggccctcccctgaccgtggtaagacggaatgcaataaatcagaattatagtggtct

SEQ ID NO: 1234 - DNA, 662 bp, Mus musculus
  misc_feature (510)..(510): "n" = a, t, g, or c.
  misc_feature (614)..(614): "n" = a, t, g, or c.
  misc_feature (622)..(622): "n" = a, t, g, or c.
  misc_feature (633)..(633): "n" = a, t, g, or c.
taagcaatgagttccaaacagcaatgtgtgaaactgaatgatggcaacttcatccctgcgctgggctttggcacctacaaaccagaagaggttaatgaaaataagccactggaggctatccatttagctctagaggctgggttccgccatattgatactgcttatgtgtaccaaactgaaaatcatgtagggcaggctattcgaagcaagattgcagctggccttgtgaaaagagaagacatattcctcactacaaagctttggtgcactttccataggccagagctggttcgctctaacttggagaaatctttgaaaaacctgcagctggattatgctgaccctctatcttatacattatcccgtgcaaatgaagccaggggaagatctgtttccagaagatgagcatggaaaaacattatttgacacagtggatatatgtgccacatgggaggccatggagaagtgtaaggatgcaggattggtcaagtccattggtgtgtccaactntaatagcaggcagctggagaaaattctgaataagcctgggctcaaatacaagcctgtttgcaaacaggtggaatgccatctctacttgaaccagagggagctgntgaactanctgaagtcaanaggacattgttctagttgcccactgtgct

SEQ ID NO: 1235 - DNA, 1225 bp, Mus musculus
gagaactctctgcagcaaccatggccaccttcgtggaactcagtaccaaagccaagatgccccttgtgggcctgggcacctggaagtcttccccaggccaagtcaaggaagccgtgaaggcggccattgatgctgggtatcgccacattgactgtgcctatgtgtatcacaatgagaatgaggtgggagaagctatccaagagaagatcaaagagaatgctgtgaagcgggaggatctcttcatcgtcagcaagctgtgggccacattctttgagaaaagcctggtgaagaaagccttcgacaacaccctctcggatctgaagctggactatctggacctgtatctggtccactggccacagggatttcaggctgggaatgcgttattacccaaagacaataaaggcaaagttctcctgagtaaatccacattcttggatgcctgggaggccatggaggaactggtggaccaggggctggtgaaagctctgggcatctccaacttcaaccacttccagattgaaaggctcctgaacaagcctggactaaaacataagccagtgaccaaccagattgagagccacccttatctcacccaggaaaaactgatccaatactgtcaatccaagggcatcgctgttacagcctacagtcccctgggctccccagacaggccttatgccaagccagaagaccccgtagtaatggagattcccaagatcaaagagattgctgcaaaacacaagaaaacagtagctcaggttctgattcggttccatgtccaaaggaatgtggtggtgatccccaagtctgtgacaccctcacgcatacaggagaacctgcaggtcttcgacttccagttgagtgaggaggacatggctgccattctcagcttcaacaggaactggagggcctgtgacctgttggatgcaaggactgaagaggactatcctttccacgaggaatactgaggtccacttgcttgatgagatccgtgcatgatagattccttcgtctctctaaaatcaacctggatgtaggctaccatctggcaatgcaggatttaaatttttgtgttcatcaaggagcaagaaaatgttccagagaaacgaagggcaacggttctcactagcgagggctgagcacatgtttgtcatcaggagcatgtagtatggtaacactgaagatacaatgatagaacaataaaaaagcaataataggaatt

SEQ ID NO: 1236 - DNA, 450 bp, Mus musculus
  misc_feature (417)..(417): "n" = a, t, g, or c.
tttttttacaagttggttagaattttattgaaacggacaccaccacaatacacaacatctagagaagtttggacaagtagaccactggagaagagttaaagaccaaattagaattttgtgagcaggactggaagctaaagggaaaccaggattttgttgtttgtttgttttcacgaagaacagagagatgtattctcagtgaccacattagaagaggactaaagtagtccagtggccatctctgccccagtctgttttcagggcactttaaagtagggtagcactctgtttccttgaacttgaggcaatccctctgcctcagcccccgcactgctaagattacgggcaggagccactgtacttgtctggaggtggttttgaagcttttctgctctcctgtcctacatggctcaccgncaagtggcttcctgtctctcttttctttttata

SEQ ID NO: 1237 - DNA, 933 bp, Mus musculus
gcgtctctgctgcttttgtgctctccctcccgccatggccagccttaaggatctcgaagggaagtggcgcctgatggaaagccacggctttgaggagtacatgaaagagctaggagtaggactggctcttaggaagatggctgccatggccaagccagactgtatcattacgtgtgatggcaacaacatcacggtcaaaaccgagagcacagtgaagacgactgtgttctcttgtaacctgggagagaagtttgatgaaacgacagctgatggcagaaaaactgagacggtctgcaccttccaagacggtgccctggtccagcaccagcaatgggacgggaaggagagcacgataacaagaaaactgaaggatgggaagatgatcgtggagtgtgtcatgaacaatgccacctgcactcgggtctatgagaaggtgcaatgagggcttcctcgtcatcctggacaggagttagctgccagagtgaatatgctcaattcagtgagcggtcaaatgcaacaaacagcttcacttctttggttttatttttcatgactgttgagttctctttatcacaaacactttacatggaccttcatgtcaaacttggtttacccaggatcattcctttggttagtaaataaacgtgttagtgctaatttatgatatgtgtgtgggttcttcaaggaattgaaaattggtgatacattataacacttagaaattgaaaagtctctggtattcttaggggatcccttatgactggatatatcctagcaacttgtagacgtggccagcttcttttgcagtgaatacatgccccgtcatttaagcttgccttaaatcgtttgaactttgtcaactcaataattgagactattcctatcgaatgatagctacataaattttatagaataaagggagatccaagctta

SEQ ID NO: 1238 - DNA, 798 bp, Mus musculus
atggctctgcagatccccagcctcctcctctcggctgctgtggtggtgctgatggtgctgagcagcccagggactgagggcggagactccgaaaggcatttcgtgtaccagttcatgggcgagtgctacttcaccaacgggacgcagcgcatacgatatgtgaccagatacatctacaaccgggaggagtacgtgcgctacgacagcgacgtgggcgagcaccgcgcggtgaccgagctggggcggccagacgccgagtactggaacagccagccggagatcctggagcgaacgcgggccgagctggacacggtgtgcagacacaactacgaggggccggagacccacacctccctgcggcggcttgaacagcccaatgtcgtcatctccctgtccaggacagaggccctcaaccaccacaacactctggtctgctcagtgacagatttctacccagccaagatcaaagtgcgctggttccggaatggccaggaggagacggtgggggtctcatccacacagcttattaggaatggggactggaccttccaggtcctggtcatgctggagatgacccctcggcggggagaggtctacacctgtcacgtggagcatcccagcctgaagagccccatcactgtggagtggagggcacagtctgagtctgcctggagcaagatgttgagcggcatcgggggctgcgtgcttggggtgatcttcctcgggcttggccttttcatccgtcacaggagtcagaaaggacctcgaggccctcctccagcagggctcctgcagtga

SEQ ID NO: 1239 - DNA, 1121 bp, Mus musculus
ctctcctgcagcatggtgtggctccccagagttccctgtgtggcagctgtgatcctgttgctgacagtgctgagccctccagtggctttggtcagagactccagaccatggtttttggaatactgtaaatctgagtgtcatttctacaacgggacgcagcgcgtgcggtttctgaaaagatacttctacaacctggaggagaacctgcgcttcgacagcgacgtgggcgagttccgcgcggtgaccgagctggggcggccagacgccgagaactggaacagccagccggagatcctggacgaaaagcgggccgcggtggacacgtactgcagacacaactatgagatcttcgataacttccttgtgccgcggagagttgagcctacggtgactgtgtaccccacaaagacacagcccctggaacaccacaacctcctggtctgctctgtgagtgacttctaccctggcaacattgaagtcagatggttccggaatggcaaggaggagaaaacaggaattgtgtccacgggcctggtccgaaatggagactggaccttccagacactggtgatgctggagacggttcctcagagtggagaggtttacacctgccaggtggagcatcccagcctgaccgaccctgtcacggtcgagtggaaagcacagtccacatctgcacagaacaagatgttgagtggagttgggggcttcgtgctgggcctcctcttcctgcgagcggggctgttcatctacttcaggaaccagaaaggacagtctggacttcagccaacaggactcctgagctgagatgaagtaacaaggctgaaggaaggagttccccccgtgtctccatgccatgaaaacatgtcctgcttggcccacatccctccagagacactgctcttccaggacctggctcctcctgattctccaccctggagatctgtgctcctgatggctgcttatccctgacccaggccttgcagctcccagaacagaggccccactcttcacatctcctgtccccttttgtcccttgccttttgtctggcacttctgagccagtctgctgtcatatgcttttttacatttttctcaaataaacaaataatgaaagtcaa

SEQ ID NO: 1240 - DNA, 1744 bp, Mus musculus
ggcacgaggaaggatcggtttttaaagtaaagactgtctgtatggagccactagccatcctggcactgctgagcctaccaatctgctcagcgtatcctctgcatggggcagtgacacaaggccacccaagcatggatcttgctcagcaatacctagaaaaatactacaactttaaaaaaaatgagaaacaaattttcaaaagaaaggacagtagtcctgttgtcaaaaaaattcaagaaatgcagaagttcctcgggttggagatgacagggaagctggactccaacactatggagctgatgcacaagcccaggtgtggtgttcctgatgttggtggcttcagtaccttcccaggttcgccaaaatggaggaaatcccacatcacctacaggattgtgaattatacaccagatttgccaagacagagtgtggattctgccattgagaaagctttgaaggtctgggaggaggtgaccccactcactttctccaggatctctgaaggagaggctgacataatgatctcctttgcagttggagaacacggagacttttacccttttgatgggccaggacagagtctggctcatgcctacccacctggccctggattttatggagatgttcacttcgatgatgatgagaaatggacacttgcaccctcagggaccaacttattcctggttgcagcccatgaacttggccactccctgggtctctttcattccgacaagaaagaatctctgatgtacccagtctacaggttctccacaagcccagctaacttccacctttctcaagatgatatagagggcattcaatccctgtatggagccggtccctcctccgatgccacagtggttcctgtgttgtctgtctctccaagacctgagaccccagacaaatgtgatcctgctttgtcctttgattcagtcagcacgctgagaggggaagtcctattctttaaagacaggtacttctggcgcagatcccattggaatcccgagcctgaatttcatttgatatcagcattttggcccactcttccttcagacttagatgctgcctatgaggctcacaacacggacagtgttctgatttttaaaggaagtcagttctgggcagtccgaggaaatgaagtccaagcaggctacccaaaggggatccacactctcggttttcctcccaccgtgaagaagattgatgcagctgtttttgaaaaggagaagaagaaaacgtacttctttgtaggggacaaatactggagatttgatgagacaagacatgttatggataaaggcttcccaagacagataacagatgattttccaggaattgagccacaagttgatgctgtgttacacgaatttgggtttttttatttcttccgaggatcatcacagttcgagtttgaccccaatgccaggacggtgacacacatactgaagagcaacagctggctgctgtgctgatcatcatgacaagacatatacaaccctgtaaaatgagtctcatgacttcccacctactttattatgtgtcagaatgattagttgctcctgcatgttctgtggctccggatgagcgcagcagatgtctttcataatgagtcacaaagcatcacctgagcacagaagtgaaattttctcactgcagtaggtgagaggatgcatccatccccatgggtattttattatttaataaagagctttatttttgaaaaaaaaaaaaaaaaaaaaaaaaa

SEQ ID NO: 1241 - DNA, 2193 bp, Mus musculus
atgagtccctggcagcccctgctcctggctctcctggctttcggctgcagctctgctgccccttaccagcgccagccgacttttgtggtcttccccaaagacctgaaaacctccaacctcacggacacccagctggcagaggcatacttgtaccgctatggttacacccgggccgcccagatgatgggagagaagcagtctctacggccggctttgctgatgcttcagaagcagctctccctgccccagactggtgagctggacagccagacactaaaggccattcgaacaccacgctgtggtgtcccagacgtgggtcgattccaaaccttcaaaggcctcaagtgggaccatcataacatcacatactggatccaaaactactctgaagacttgccgcgagacatgatcgatgacgccttcgcgcgcgccttcgcggtgtggggcgaggtggcacccctcaccttcacccgcgtgtacggacccgaagcggacattgtcatccagtttggtgtcgcggagcacggagacgggtatcccttcgacggcaaggacggccttctggcacacgcctttccccctggcgccggcgttcagggagatgcccatttcgacgacgacgagttgtggtcgctgggcaaaggcgtcgtgatccccacttactatggaaactcaaatggtgccccatgtcactttcccttcaccttcgagggacgctcctattcggcctgcaccacagacggccgcaacgacggcacgccttggtgtagcacaacagctgactacgataaggacggcaaatttggtttctgccctagtgagagactctacacggagcacggcaacggagaaggcaaaccctgtgtgttcccgttcatctttgagggccgctcctactctgcctgcaccactaaaggccgctcggatggttaccgctggtgcgccaccacagccaactatgaccaggataaactgtatggcttctgccctacccgagtggacgcgaccgtagttgggggcaactcggcaggagagctgtgcgtcttccccttcgtcttcctgggcaagcagtactcttcctgtaccagcgacggccgcagggatgggcgcctctggtgtgcgaccacatcgaacttcgacactgacaagaagtggggtttctgtccagaccaagggtacagcctgttcctggtggcagcgcacgagttcggccatgcactgggcttagatcattccagcgtgccggaagcgctcatgtacccgctgtatagctacctcgagggcttccctctgaataaagacgacatagacggcatccagtatctgtatggtcgtggctctaagcctgacccaaggcctccagccaccaccacaactgaaccacagccgacagcacctcccactatgtgtcccactatacctcccacggcctatcccacagtgggccccacggttggccctacaggcgccccctcacctggccccacaagcagcccgtcacctggccctacaggcgccccctcacctggccctacagcgccccctactgcgggctcttctgaggcctctacagagtctttgagtccggcagacaatccttgcaatgtggatgtttttgatgctattgctgagatccagggcgctctgcatttcttcaaggacggttggtactggaagttcctgaatcatagaggaagcccattacagggccccttccttactgcccgcacgtggccagccctgcctgcaacgctggactccgcctttgaggatccgcagaccaagagggttttcttcttctctggacgtcaaatgtgggtgtacacaggcaagaccgtgctgggccccaggagtctggataagttgggtctaggcccagaggtaacccacgtcagcgggcttctcccgcgtcgtctcgggaaggctctgctgttcagcaaggggcgtgtctggagattcgacttgaagtctcagaaggtggatccccagagcgtcattcgcgtggataaggagttctctggtgtgccctggaactcacacgacatcttccagtaccaagacaaagcctatttctgccatggcaaattcttctggcgtgtgagtttccaaaatgaggtgaacaaggtggaccatgaggtgaaccaggtggacgacgtgggctacgtgacctacgacctcctgcagtgcccttga

SEQ ID NO: 1242 - DNA, 1143 bp, Mus musculus
atgatgttctcgggtttcaacgccgactacgaggcgtcatcctcccgctgcagtagcgcctccccggccggggacagcctttcctactaccattccccagccgactccttctccagcatgggctctcctgtcaacacacaggacttttgcgcagatctgtccgtctctagtgccaactttatccccacggtgacagccatctccaccagcccagacctgcagtggctggtgcagcccactctggtctcctccgtggccccatcgcagaccagagcgccccatccttacggactccccacccagtctgctggggcttacgccagagcgggaatggtgaagaccgtgtcaggaggcagagcgcagagcatcggcagaaggggcaaagtagagcagctatctcctgaagaggaagagaaacggagaatccgaagggaacggaataagatggctgcagccaagtgccggaatcggaggagggagctgacagatacactccaagcggagacagatcaacttgaagatgagaagtctgcgttgcagactgagattgccaatctgctgaaagagaaggaaaaactggagtttattttggcagcccaccgacctgcctgcaagatccccgatgaccttggcttcccagaggagatgtctgtggcctccctggatttgactggaggtctgcctgaggcttccaccccagagtctgaggaggccttcaccctgccccttctcaacgaccctgagcccaagccatccttggagccagtcaagagcatcagcaacgtggagctgaaggcagaaccctttgatgacttcttgtttccggcatcatctaggcccagtggctcagagacctcccgctctgtgccagatgtggacctgtccggttccttctatgcagcagactgggagcctctgcacagcaattccttggggatggggcccatggtcacagagctggagcccctgtgtactcccgtggtcacctgtactccgggctgcactacttacacgtcttcctttgtcttcacctaccctgaagctgactccttcccaagctgtgccgctgcccaccgaaagggcagcagcagcaacgagccctcctccgactccctgagctcacccacgctgctggccctgtga

SEQ ID NO: 1243 - DNA, 448 bp, Mus musculus
ccaaagtcatcgacacaaccaccctgcctgtgtatcctaagaagcttagacccctggagaagcaggggcccatggagtccaggaacctctggcaggaagtcacccactacctgaggcttggggacattgacgcagccacagagcagaaacgacgcctggaggagaggcagagggtggaggagaggaaacgggagacccttcgcacaccgtggcgacccaagtatttcatcccggagggcgatggctgggtgtacttcaaccccctctggaagacacactgatgggcggaggtgcagtgcttcccgtaataggcctggttttgtaggaattaaagtggtacagtatcaagattccgttggtatttgttgaaatctcttgctagcatccaagtcggagagaggggttacatgaaacatgcacctccaaattctgtctgaggattttattc

SEQ ID NO: 1244 - DNA, 1331 bp, Mus musculus
ggacattcggcctctgtgagccgcaaccttgcccagcgagcggttgggtgttcgccatcttaggaggatgttctcgtccgtagcgcacctggcgcgggcgaaccccttcaacgcgccacacctgcagctggtgcacgatggcctgtcgggtccccgcagtcccccagctccgccccggcgttcccgccacctggccgccgccgccgtggaagagtacagttgtgaatttggctccatgaagtattatgcactgtgtggctttggtggggtcttaagttgtgggctgacacacactgctgttgttcccctggacttagtaaagtgccgcatgcaggtggaccctcagaagtacaaaggcatatttaatggattctccattacactgaaagaagatggcgttcgtggtttggctaaaggatgggccccaactttgattggctattccatgcaagggctctgcaaattcggcttttatgaagtcttcaaagccttatatagcaacatacttggtgaggaaaacacctacctgtggcgcacatcactgtatttagcttcttctgccagtgctgaattcttcgctgacattgccctggctcctatggaagctgctaaagttcgaattcaaacccagcctggttatgccaacaccttgagggaagctgttcccaaaatgtataaagaggaaggcttaaatgcgttctacaagggcgttgctcctctgtggatgagacagatcccgtacaccatgatgaagttcgcctgctttgaacgtactgttgaagctttgtacaaatttgtggttcctaagccccgaagtgaatgtacaaaggcagagcagctggttgtgacatttgtggcaggttacatagctggagtcttctgtgcgatcgtctcccaccctgctgactctgtggtctctgtgctgaataaagagaaaggcagcaccgcgtctcaggtcctgcagaggctgggcttcagaggtgtgtggaaggggctcttcgcccgaatcatcatgattggcactctgactgcactacagtggttcatctacgactctgtgaaggtctacttcaggctccctcgccctcctccccctgagatgccagagtctctgaagaagaagcttgggttaactgagtagatacatcaaagtaacatggactgaatctgcttgttgatcagtgttgaaagtgcaaaggaacttttatatatttgacagtgtaggaaatgtctgttcctgatataattactgtagtacccttgcttaaagcaagagtttcaaacttaatgctaaataaacccatctattcctgaataaaaaaaaaaaaaaa

SEQ ID NO: 1245 - DNA, 2905 bp, Mus musculus
aaacaaaccttgccaggctaccctctcgcgttgcaggcagattgctcacccatcttcgtctctctcttcacctcccgcggggcgctgcacctccaaccttgtggttggctcctttccgtgcttgcttgctcattaggtgtgtgatagcacggaaatgtcccgagagctacatgacgtggacctcgctgaggtgaagcctctggtggaaaaaggggagagcatcactggtctcctgcaagagttcgatgttcaggagcaggatattgagaccctacatggctccctgcatgtcaccctgtgtgggacccccaagggcaaccgtcctgtcatcctcacgtatcacgacatcggcatgaaccacaagacctgctacaaccccctcttcaactctgaggacatgcaggagatcacacaacattttgctgtctgccatgtggatgcccctggccaacaggatggtgccccttccttcccagtggggtacatgtacccctcaatggatcagttggctgaaatgcttcctggagtccttcaccagtttgggctcaagagtgtcattggcatggggacaggagctggcgcctacatcctgacccgcttcgcactcaacaaccctgagatggtagagggtctcgtgctcatgaatgtgaacccctgtgctgaaggctggatggactgggctgcctctaagatctcaggatggacccaagccctgcctgacatggtggtgtcccacctcttcggcaaggaggagatacacaacaacgtggaggtagtgcacacgtaccgccagcacatcctcaacgacatgaacccgagcaacctacacttattcatcagcgcctacaacagccggagagacctggagattgagcggccaatgcctggaacccacactgtcactttgcagtgccctgctctgctggtagttggagacaactctcctgccgtggatgctgtggtggaatgcaattctaaattggacccaacgaagaccaccctgctcaagatggcagactgtggaggccttcctcagatctctcagcccgccaagcttgctgaggccttcaagtactttgtgcagggcatgggatacatgccttctgccagcatgactcgcctgatgcggtcccgcacagcctctggctccagtgtcacatccctggagggcacccgtagccgctcccataccagcgagggcccccgaagccgctcgcacaccagtgaggggtcccgtagccgctcccataccagtgaggatgcccgtctcaacatcacccccaactcgggtgccaccggaaacaatgccgggcccaagtccatggaggtgtcctgctaagcaatctgtgcatcagtcaccctggactggtggcctctcccttagcccccaacccttgcctgccaccctacgctaatgcggtattaatctaaagctgcttttgtaagaatgaactctggcggtggcagacccaggctgttctgactgcctcctgggaccagggtgggtggtggtggaccaaaggcaagaagcagttcagcgtactgttctgctaacaagtggcctggtggaccctctctctaccctcagacaccaaactgccaaaactaagaaatagatagctgtaacactgcctggctccaagcccaggctgatccagcattctggttcataggcgttttgccaacctgcctacttcctgtttcctccccactaaactcattcctggaaacaaacttctgttttgaaaggagagagagaggcaggaaagttgggcgccttattttaagtagagaaaccaagaaaggaagagaaaaaaaggcagggtctagggcaggtagaggaaaaacacaacaagtctactaggctcacttgaaggaattgattttaaagttctggacgctgaaacccacaacctgtttttctggcaaccttttaacgtgcaagaaaaactggtaacaaaccccaggctttatagagaaagtgatccagcaaatgtggggcatcagtgatttaagactcttgctatgcagtctactgtaccccgctcccattccacagtgaatgagtggatgacacctctgtccctcgggaagatggttttgatttgttgttgcattctttgaggcagagggagaacccagcaggtgacaggggtccttgtctgggatgagtctttaggatgggaagggtggggatagaatggccctgggattttgaggactcatggtagggccaagtgctagaacctggtgggtgtgatttcattgatctggaatcttgtgtgactgagtcacaccttgtctcccataattgatgtctggcattgatttgaaacttgatagctgaatgtctcttaactggccatcgctggttcttcagagagaaccgtatgttctagtgggggaaggactggttttgggttctgtacattccacgggaacttgcttccctctcctgcccctcctgctgactgggtttgtagcattggcctcttaagcaatgccagcctaatgcccatgctccatactactgccttttgattcttactgtggctaaccttgaacctttcctataggaaatgtgatcagatcagagacacttgatcgttgggagtcagccctcaaggcctggcgacttccaggatcttggagttgctagaggaaaagtagttatgccctataggcggcatgagagacaagggatcagtttacctgccaactcctaccgtggaggaggagttccactgaccttgtgtagaaagatcaggaatccaggccagggtgattgaatgctgacaagaaatcactgtatatgtctctccagggcagtttcttaataagatgtttgtatttatttccagaccaataaatttgtaactttgcccaaaaaaaaaaaaaaaaaaaa

SEQ ID NO: 1246 - DNA, 352 bp, Mus musculus
tttttttttttttttttaaacgttgtatttattgttatttaagctgctcagcaaaacatatacacgtatatacagtatgcgtgaatacggaagactcaactttacatatttaaaaaaaagaaagaaagaaaaataccactcagtttcatgagctattgtcagtcactgtcttccaaccaagcattcagaaatggttttaagagtcaaaaaaagcttacaggttcgcgcaccgcaccgcagggttaagggttcatattatacatgtgcaatagcgatttccttctctctactggagttggctgcggactgattacagtgttcccaggctcctgcgcttcgggcatggttttct

SEQ ID NO: 1247 - DNA, 457 bp, Mus musculus
  misc_feature (332)..(332): "n" = a, t, g, or c.
tttttttttttttttttcgcaaaatctgtcaatttttattaactgggttaggggagggtttttatcagagcacattatgaaaacattaggacattacagacaggcgtgagataagcgtcagaccgaacagatgaagcaagtccctcagccatctgagaaacattaataatgaaatagtgcagaaacaaatctttgttaggggtaccggatgcaaagggaaaaagcagagatcctggcgcccccttgtgttgcaaaatgaacctgcacctttatttcattttgctgtttcccttttgaagttgggaattcatgcccttgtccctgtgccccanaagtaattgtttccccaaatcctagcaagccctctccagcaaatcacttccccattcactgataacttccaaggaccctatttgaaaaccaattcttgcccattcttctttacagcccacacatc

SEQ ID NO: 1248 - DNA, 781 bp, Mus musculus
ggcaacccttgcggctcacacaaagcaggagggtgggaagcccagatttgccatggagaaattttcagtgtctgcaatcctgcttcttgtggccatttctggtaccttggccaaagacaccacagtcaaatctggagccaaaaaggacccaaaggactctcggcccaaactacctcagacactctccagaggttggggcgatcagctcatctggactcagacatacgaagaagctttatacagatccaagacaagcaacagacccttgatggtcattcatcacttggacgaatgcccacacagtcaagccttaaagaaagtgtttgctgaacataaagaaatccagaaattggcagagcagtttgttctcctcaacctggtctatgaaacaaccgacaagcacctttctcctgatggccagtacgtccccagaattgtgtttgtagacccatccctgacggtgagggcagacatcactggacgatactcaaaccggctctacgcttatgaaccttctgacacagctttgttgtacgacaacatgaagaaagctctcaagctgctaaagacagaattgtagagctaactgcgcaccgggtcaggagaccagaaggcagaagcactgtggacttgcagattacagtacagtttaatgttacaacagatatattttttaaacacccacaggtggggaaacaatattattatctactacagtgaagcatgattttctagaaaataaagtcttgtgagaactccaaaaaaaaaaaaaaaaaaaaaa

SEQ ID NO: 1249 - DNA, 389 bp, Mus musculus
tctgggaccacagatcaggttctggaaacgctgttacctgaggggcaggcctgaggtccaggaactgttaagacaatggacaccaagaatatctcccgaggaccagagcaagaaaagagatccgaataccatcctctctcagatctgctgaaactgtttgttagcgtcgttctcagaggcagggcaggggtctctgctcatcttcctgtctgaccttgacgcctcagctttggcattccagtctgcagagttcacttagaaggcccgtttctgtagcagatggtggcgctaccaacctaaaggtctcccgatttgtttgatttctggggctattttcatttcttgtgatttgaaaactaagaaacaagaccagttcagaatgcgattgc

SEQ ID NO: 1250 - DNA, 390 bp, Mus musculus
ctctaccttctagtgaaatatcctctcatactcttattacctaatcttactctaccatctatttcttattttatttctttctttttcttcctgagtttttctttttttccattttttttactcttcttgaacacgagcaacctattcctgaagggcggagattgtgagagctgaggagcccttatggggagggccaaagcgcaaagagggagactgttacagggcttgctttctggttccttttttttcccccttttcttttttttgttttgtttgttttgtttttccagttgggtttttctgtgtacccctttctcttttggaactatctcaaactcagagatccacttgcctttgcttcctgagatctaggattaaaaggtatgcgcc

SEQ ID NO: 1251 - DNA, 421 bp, Mus musculus
ttttttttttttgtcttgggtaccttatcacttgtatcttactataaaagtgaagggtgagctctggctatctgttgtaggtcccactggatataactttgggtgtctgtgtgtcccttatgtctgtgtgctggtagatatcgaaactatttcctatcttggagcagtatagaacatttgcatgtcgtgatagttctcctaacttttaaaaacatcttttactccagtccaaggacagactgtggcagtgctgctataaaatccctgcatcaaataattgtcttcattatccttttggtactcacctttcattttgtagacttgtcatcatatacattatgtactcaaacacaatttccattcttggaagaagtcagatgtaaactgcaagccaacgtcagggtcaatgtaacttcaagat

SEQ ID NO: 1252 - DNA, 303 bp, Mus musculus
ttcttatatccccgaagcgcaactcaaattgaaataaaaggccaaatagacccgcgtgtgtctagtaggttttctaggtcaattcttattttgtgggcgggatccccttttcattagtctgacattcagattgggaaacacatgtgtttctttagaaaaaaaaataatttcaattcctgccagtatagttccactatcacaatttcttctgttggcagactatttctttcctttttttatttacataaactttctttttagaagtatgtgatttgcttttaaaataaaagtttactgatcatc

SEQ ID NO: 1253 - DNA, 442 bp, Mus musculus
ttcggcacgaaggggaaaaaaacattgagcatactttccacaaaaaaaagtttatatttaaaatgaaaaaaaaaattcagtcacaaaggcattcaagtagtaatgttacacagcgtttgcttttcctttatatcaagacagatttgcacaagtgtttgcaatagtttgtatacaacccacagtcctttatatatatataataataataaattttgtttagatttgtttttaagatggaagtggtcacgctaattggatgtgtacaggccgaagtgatccatcgcaacacatttataaatgcaaattttacaggcaagcacatttccatatacctatctgtatctgcctgtagacagatatagttaagaaaaaaaaaaccttaaaaatgaacacaaggaagtctactttgtcaagctaaccccttatgtactggctgtcattt

SEQ ID NO: 1254 - DNA, 3355 bp, Mus musculus
cggacgcgtgggcggacgcgtgggcggacgcgtgggtggatgctggaccttgctgctgctgctgccgccgccgccgctgttgctgtccctacagctgtggttgttgcttcccaggggctgcaggagcatggactactaaacccccacttcttcagcgtgagttgaattcttgttgccagaatggggaaacagaacagcaagctgcgccctgaagtcatgcaggacttactggaaagcacagacttcacagagcacgagatccaggagtggtacaaaggcttcttgagagactgccccagcggacatttatcaatggaagagtttaagaaaatatatgggaactttttcccttacggggatgcttccaaatttgcagagcatgtcttccgcaccttcgatgcaaacggtgatgggacaatagactttagagagttcatcatagccctgagtgtgacatcaaggggcaagctggagcagaagctgaagtgggccttcagcatgtatgacctggatggcaatggctacatcagcaaggcagaaatgctggagattgtacaggcgatctacaaaatggtttcctctgtcatgaaaatgcctgaagatgaatcaaccccagagaaaaggacagaaaatatcttccgccagatggataccaatagagatggaaagctctccctggaagaattcatccgaggggccaaaagcgacccatccattgtgcgtctcctgcagtgtgaccccagcagtgccggccagttctgagccctgcacccccaggacgctacagctgcttgtgtccctcctgattagcttttaaacttacttcggtttttgtttttgccaaacaatattgatggtgacactgtgccctcttcagtcagatgtgccctcctgtgacacttttgccccttgcttctttcatggtggatgtgaatgcccagagcccacgtgcttgtggagagcatgcacagacttcgtggtgttccccagtggatggcttttttaatcatcttttttttcccctttgattctaatgtctctatcttaaaacctaagccctgaggggcaagacaagggaagtacattcagcccggggcttcttctgcaagcttccaggggctttgtttgaaatacaaaactcctaccctgggtctgttgtcacacatgccctgggagctagagcagacacctgaggctaagtttttaaagaacaggttaccctctggggagaggctattaaaggcagctgggacatttccccccagaggccactccctctcaccccagcaggctgtaatttctaagctgtgaacttttcaaggtaaattaacagagatgggaaaagatggctcagctgtttgttttgttttgttttgttttgtttttctcccacaggtttacatagttgagctaatacaagtttctttaaaaaaaaaaaaaatcaaacacatattcaaatgccagacccatcttgctgcctactggtgatttataaaagactgctgtatataaaacattggatattgcagaccaaattaagtgttttgccttgtaaaatgcatgtttagcgagcgctaatacaatcttactacagaagactgttttagtagcttattgtgaagccaactacaatgaatgtcgatgtcttgttttaaagtcatagctgtctttgcacaaatgtaccagttagcaagtatattttatatactccataaaatcacagaatggtgacaggggcccagctttgatttcaaatggcttcctagagtcaaggtggctggaggacacgaggaagccaactgtccaggcatcctgtccaccagagcagcacggtgagctccacaaggacaagggaccaaggcccagcagcgtactggcagcaagcgcaggtgcaacgcttgtctcagcagatgaatgtcctacagacgcagaaaaacagagacttcaagcagtttaacccacatccttggtgggggagccacatctagaatgttcatttttcctgcccccaggtaccctagtcaggtgtgggctagccaggtgattcacccattataagaaccagcaaagggacctgcagtgtccaaggccaaccatgggggtcccaagagcgctcttcctcactgtgttctttgaatgcagcaaagttgagctgctgcctcggctggtcacctcatgcacactactttgaaattagggctggaaataaaaactcctggccacaggcaagataaggcctcacaaacagcttacatcagaagatctaaatactcaagaatgttggtggcagaccctaagaggagcagcctaagaggaggcaggaaggtctctgtctggcaggggccaagccgtgtcctgtaaaacaagaaccacaaaaagataaagacaacctgaaggaaagtttcctgccagccccaggtcccccacagtgacactcgtaactggcagaagtttaaacttgaatggtgaattaaaatgaatcacttagtaggttgaaatttagagacctagattttgtaatcttaatctttcctagtgtcgtttccttacattttgtaccaaggtttgccaactcctgtggaccaaatggtaaagtctgtttttgtaaagaagaattaactcaagtggttgagcataaacaggtgaagggagccgacatgctggtttgtgaggtaggctcacctacttgggctctgcctcaggttgggccaaaccctgtgtttcctagaacttagagatggggtgggaactagaggtgctctccagctattaggaaatgaaagagccagatgcaagagttatgaaccctgtggtccccagaaggcatggagagttccagaactggttacaccacagacctaacagatatatccgtacatcctcctcctccccacctggccccaggaaggcactggacctgtgtaattttcatgcatgcatgttggaccaagggacttcacagcatcaagagggccgagtgcctgaagtcaactgtcactcctgtggctaggcattgttttgctgtgttcagagatctctgtggaggaaatggagcctgttttgttccaagtaaaggcagcttgtgctgtccatggaactggagtaaatggcttatgagttgaaggatgtttcagaatgctggactgttcatacctcgcttaggatggaggaggggatgctgtgggtaccaccccaccccagcagtactccctggggactttctacagatgaatttaataatatatatgtcatactatgtggaatggtcccgttatcagttggttgtgtagctcttgcctggcattaaagcatgtttattatttaataaaaaaaaaaaaaaaaaaaaaaaaaaaaa

SEQ ID NO: 1255 - DNA, 292 bp, Mus musculus
tttttttttttttttttaaatcaaattcatctctgggattagaacaatcagtagtgtaaataggaaccagacacaaatttgatttaaaacaaagaaaaaaaataacaaaaatcccaactctgggagatctggcattggccaaactttctctggaagattccaaagttaaaacccttgcaaagggaagagaaggtaacagagatgccagtgtctttacgtccacagggatagagaatagagggagtccttttaggacctctgcattggcgtggacaagatggccctcgtgccg

SEQ ID NO: 1256 - DNA, 440 bp, Mus musculus
ttttttttttttgttttaacaaacatgtttattagaaaagtaaaaatattgcataggtcttaatacttgaacatcaagtgtattcatgaaccgcgagtaacttcatgtaaacaggttctagatggaagacccaggtggcactcctctgggaaaagagggttccagccccccacccccaccccagcccctctcctcacagttgaatcctccagtacatgggcaccgggatgggctggctgcagctcccaggtgtaattttgtttcaagtgtcgaagatcccgaatgatcctaacacccaccccattcctactcttacattcatgcagtctgttagatagctgcctcgaacaggtcagtaatgaagcgccgatccccaccccccaaaaccaagatacaaaacaaatgacaaaacacactaggtcctttcagaccagaagata

SEQ ID NO: 1257 - DNA, 1659 bp, Mus musculus
ggagagagcaggacacagctatggatgccgccaggagaggagatacacagccagtgatgtggaccaccggatggctgttgctgctgccgcttctgctgtgtgaaggagcgcaagccctggagtgctacagctgcgtgcagaaggcggacgatggatgctctccgcacaggatgaagacagtcaaatgtggtcccggggtggacgtctgtaccgaggccgtgggagcggtagagaccatccacgggcaattctctgtggcggtgcggggctgcggttccggaatcccgggcaagaacgaccgcggactggaccttcacgggctcctggccttctttcagctacagcagtgctccgaggaccgatgcaacgccaaactcaacctcactttgcgaggcctcaaccctgcaggcaatgagagtgcatatgagcctaacggtgcagagtgctacagctgtgtgggtctgagccgcgagaagtgccagggctccatgccgccggtcgtgaactgctacaacgccagtggccgtgtctacaagggctgcttcgatggtaacgtcaccctgacggcagccaacgtgaccgtgtccttacctgtccgaggctgcgtccaggacgagacctgcacccgggatggggtgacgggtccaggattcacactcagcggctcttgctgtcagggcccccgctgtaacgccgaccttcgcaacaagacctatttctcccctcgaatcccacccctagtcctgctgccccctccaaccaccgcagccccatccactcgggcccagaactcctccagcacgacctctacagcagccccaaccacgaccacctccatcatcaagcccaccacagcccaagccagccacacttctccccatgaaatggatctcgaagtcatacaggaagagggggcgtcgttgagtggaggtgctgcgggccatggaggtactgcgggccatggaggtgctgcgggccaccaagaccgcagcaatatggagaagtatccaggaaagggtggggcccagatcccagctaaaggaggctctggcactctagggtcctggttgtctgcagttctgttgactgtggttgctggcgcgatgctgtgaatgtctcatctcgaaaagtccatctcactttgtttccctggccccgtggtaccaactctttccatttctcacttgactggactggctccgcccccatccttcagcattctcagttccgactgcactggtttgcagcttcggaaaacagtcctctgttgtaaatattccgctcgggtggccctacttttttgatgcggccacagcattccccctgatggtgaccaggacagagggaagagacgtctactggctgagagaggcccagagagtccacggcaagcctcctcttcccgttttcctgaccaggctggaagatgaccaggcaggtagacaatggatccatcctccgagcactgtgcttgcctggcacattgtgcggaaatctggtcgcctgtcttccttaggagactgtgaacaactctacaacagggtcttgtctctggcctctctatgtgttctgtctggcacaggaaggtgtcaataaagatttagttactttgtatagtgagttaactaaaaaaaaaaaaaaaaaaaaaaaaaaaaaaaa

SEQ ID NO: 1258 - DNA, 1822 bp, Mus musculus
accaggaccatggagcccagtgtgctgctcctccttgctctccttgtgggcttcttgctactcttagccaggggacacccaaagtcccgtggcaacttcccaccaggaccccgtcccctgcccctcttggggaacctcttgcagatggacagaggaggcctcctcaagtctttaattcagcttcgagaaaaatatggcgatgtgttcacagtgcacctgggaccaaggcctgtggttatgctgtgtggaacagacaccataagggaggctctggtgggccaagccgaggctttctctggccgggggacagttgctgtcgttgagccaaccttcaaggaatatggtgtgatctttgccaatggggaacgttggaagacccttcgtagattctctctggccaccatgagagactttgggatgggaaagaggagtgtggaggagcggattcaggaggaagcccaatgtttagtggaggaactgcggaaatcccagggagcccccctggaccccacgttcctcttccagtgcatcacggccaatgttatctgctccattgtgtttggagagcgctttgagtacacagaccgtcagttcttgcgcctgctggagctgttctatcagaccttttcactcataagctcattctccagccagatgtttgagctcttctctggcttcctgaagtactttcctggtgcccacagacaaatctccaaaaacctgcaggaactcctcgactacattggccatagtgtggagaggcacaaggccaccttggaccccagtgttccacgagacttcattgatatttaccttctgcgcatggagaaggagaagtccaaccagaacgcagagttccatcaccagaacctcatgatgtctgtgctctctctcttctttgtcggcaccgagaccagcagcaccacgctccactatggcttcctgctcatgctcaagtacccccatgttacagagaaagtccaaaaggagattgatcaggtgatcggctcacaccggctaccaacccttgatgaccgcaccaaaatgccatactcagatgcagtcatccacgagattcagagattttcagatcttatacctattggagtgccacacagagtcaccaaagataccctgttccgagggtacctgctccccaagaacactgaggtgtaccccatcctgagttcagctctacatgatccacagtactttgaacaaccagacagtttcaatcctgaccagttcctggatgccaatggggcactgaagaaaagtgaagcttttctgcccttctcaacaggacaaatttttgatcaaaagtctgtgggaaagcgcatttgtcttggtgaaagcattgcccgcagcgaattgttccttttcttcacgtccatcctccagaacttctctgtggcaagccatgttgctcctaaggacattgacctcactcccaaggagagtggtattggaaaaatacctccaacgtaccagatctgcttcttggcccgctgattgggctgaggcagacaggggtcaccagtaatgttgagaatgactctgtctttgagcctctgagacagctggtggaaatcagtactcctattgcatgtctccaaatctccagggctccaaggcatgttcttcttccctgtgaatggcactggagaaatcaatcaactgtctttcttgacatgtgaaaagagacttctggagtccacatctcatgttgagtcacttcccttttcctcccaatagcccaagtgtccacttatcagctccgcatgatctgggatctgtgctaatggactctgtataaggtctg

SEQ ID NO: 1259 - DNA, 2720 bp, Mus musculus
atggaattcagtgtgctgctccttctcgctctcaccacaggcttcttgatattcttagtcagccaaagtcagccaaagacccatggccacttcccaccaggacctcgtcccctgcccttcttgggtaacctcttgcagatggacagacggggccttctgagctctttcatacagcttcaagaaaaatatggagatgtgttcacagtacacctgggaccgaggcccgtggtcatgttgtgcgggacagacaccataagggaagctctggtgaaccaagctgaggctttctctggccgagggacagttgctgtgcttgatccaattgttcagggatatggtgtgatcttttccagtggggaacgttggaaaacccttcggcgattctctctggccaccatgagagactttgggatgggaaagcggagtgtggaggagcggataaaggaagaggcccaatgtttggtggaggaactgaagaaatacaagggagcccctctgaaccccaccttctacttccagtgcatcgtagcaaatatcatctgctccattgtctttggagagcgctttgactacaaagaccaccaattcctgcatctgctaaatctgatctaccagacattttccctcatgagctcattgtccagccaggtgtttgagctcttctctgccatcctgaagtactttcctggtgcccacagacaaatctccaaaaacctgcaggaaatccttgactacattggccatagtgtggagaagcacagggccaccttggaccccagtgctccacgagacttcattgatacctaccttctgcgcatggagaaggagaagtccaaccaccatacagagttccatcaccagaacctcgtgatctctgtgctctctctgttctttgctggcaccgagaccaccagcaccacgctccgttacagcttcctgatcatgctcaagtacccccatgtcgcagagaaagtccaaaaggagattgatcaggtgatcggctcacaccggctaccgactcttgatgatagaaccaaaatgccatacactgatgcagtcatccatgagattcagagatttacagatcttgctccgattggtctaccacacaaagtcaccaaagacacactgttccgaggatacctgatccccaagaacactgaggtgtaccccatcctgagttcagctcttcatgacccacggtactttgaacaaccagacagcttcaatcctgagcacttcctggatgccaatggggcactgaagacaaatgaagctttcatgcccttctccacaggaaagcgcatttgtcttggagaaggcattgcccgcaatgaattgttccttttcttcaccaccatcctccagaacttctctttggccagccctgtagctcctgagaacattgacctcattcccaataacagtggtgcaaccaaaacacccccacagtaccagattcacttcttgtcccgttgaatgggccaagagaggagagtcagtggacttcaggttcgcatgtgtccccatttccgtcccttgtgaatggaatgggaaaacccagtgaagcacctttcttgatgtctggacagagagacttctggaggccatggcttgttctgagtcacctctctcatgcttgttaacagtcatagtccctacttgccagagcaatctagactccatgatcagtgctagcggactagagatgctctctcttgagttggctccatcatgctcccacgtgttgtgttggagggtcatgtttgagaatcccctttatagatgagtgacaggccacatgatgacatcacactgctagtgagtagcgggggacaagatcacactgtgagtctagaaaagcacctcccctccccttccctacttgtgcttaaattgagatgaaattcataaaatgaagctgacaaaatttttcagttacgtattctgagacagagtctcatgtagctcagaccaacctcaaaatcctatatacatccaaagatgtcttgaattctggatctgttttccactactggcatcataggcacatggacctacacccagattttaaactgactatatcttaatgtttagattataatgtcttttaatttattcacaatgctgtatgatttcactacctaattccaggtattttgtcacatttaaccaacaccaccccaaaccctgacctattaaaagatcagtccctcgtccctctctccataacctcccccacatctaccacctaccctgccacacacagtctgacttctgtgtcaatggactgacctgactccatgtgtcttgtagaaaaagcaacaatgtgatcttttgtcagctgtccctgcttctcaggtccctgtactgtgcgggccacagtcacacaccttcacagactttcccattctctttcttagacaaggatctcctcagccctcaggccctgaactgaatgactctgcttagattctcccacattcccctgtaagtcctccacggatctcataaatacacaaagccttcctcaccgatcaagaaagaacccttgctgtgattttgtttgagtgtgggttgcttgcttgtttgttgagacaggatctcactatgtagacctggttggtcttgagctcactaaaacccatctgcctcgacctcctgagtgctgagattaaaggtttgtgctgccacaaaaaaaaaaaaaaaaaaaaaaaaaa

SEQ ID NO: 1260 - DNA, 1933 bp, Mus musculus
cggcgggaggaaagcgcggtgaagccagattaggagcagcgagcacttggggacttagggccacaggacaccgcacaagatcgaccgactttttctggagaaccgcagaacgggcacgctggggtcgctggggctggccatggtgatggaggtgggcatcctggacgccggggggctgcgcgcgctgctgcgagagggcgccgcgcagtgcctgttgttggattgtcgctccttcttcgctttcaacgccggccacatcgcgggctcagtgaacgtgcgcttcagcaccatcgtgcggcgccgcgccaagggcgccatgggcctggagcatatcgtgcccaacgctgaactgcgtggccgcctgctggccggagcctaccacgccgtggtgctgctggacgagcgcagcgcctccctggacggcgccaagcgcgacggcaccctggccctggccgcgggcgcgctctgccgagaggcgcgctccactcaagtcttctttctccaaggaggatatgaagcgttttcggcttcctgccctgagctgtgcagcaaacagtccacccccacggggctcagcctccccctgagtactagtgtgcctgacagtgcagaatccggatgcagctcctgtagtacccctctctacgatcaggggggcccagtggagatcctgtccttcctgtacctgggcagtgcctatcacgcttctcggaaggatatgcttgacgccttgggcatcaccgccttgatcaacgtctcagccaattgtcctaaccactttgagggtcactaccagtacaagagcatccctgtggaggacaaccacaaggcagacatcagctcctggttcaacgaggctattgacttcatagactccatcaaggatgctggagggagagtgtttgttcattgccaggccggcatctcccggtcagccaccatctgccttgcttacctcatgaggactaaccgggtaaagctggacgaggcctttgagtttgtgaagcagaggcggagtatcatctccccgaacttcagcttcatgggccagctgctgcagtttgagtcccaagtgctagcccctcactgctctgctgaagctgggagccctgccatggctgtccttgaccggggcacctctactaccacagtcttcaacttccctgtttccatccccgtccaccccacgaacagtgccctgaactaccttaaaagccccatcaccacctctccaagctgctgaagggcaaggggaggtgtggagtttcacttgccaccgggtcgccactcctcctgtgggaggagcaatgcaataactctgggagaggctcatgggagctggtccttatttatttaacacccccctcaccccccaactcctcctgagttccactgagttcctaagcagtcacaacaatgacttgaccgcaagacatttgctgaactcggcacattcgggaccaatatattgtgggtacatcaagtccctctgacaaaacagggcagaagagaaaggactctgtttgaggcagtttcttcgcttgcctgttttttttttctagaaacttcatgcttgacacacccaccagtattaaccattcccgatgacatgcgcgtatgagagtttttacctttatttatttttgtgtaggtcggtggtttctgccttcacaaatgtcattgtctactcatagaagaaccaaatacctcaattttgtgtttgcgtactgtactatcttgtaaatagacccagagcaggtttgctttcggcactgacagacaaagccagtgtaggtttgtagctttcagttatcgacagttgtatgtttgtttatttatgatctgaagtaatatatttcttcttctgtgaagacattttgttactgggatgactttttttatacaacagaataaattatgacgtttctattga

SEQ ID NO: 1261 - DNA, 6887 bp, Mus musculus
cctagaccctggccagtcaccggcgtcccctgcctcggtgtccccaccctctgtaccctaagctgtacccctgcggctggcgaggggccgcggaccgggctggagatgcgaatcctgcagagcttcctcgcgtgcgttcagctcctgtgcctgtgtcgcctggactgggcttatggatactacagacaacagaggaaacttgttgaagagattggctggtcctacacaggagcactaaatcaaaaaaattggggaaagaaatatccaatatgtaatagcccaaagcagtctcctattaatattgatgaagatcttacacaagtcaatgtgaatcttaagaaactgaaatttcagggttgggaaaaagcgtccttggaaaacacgttcattcacaacactgggaaaacagtggaaataaatctcactaatgactactatctcagtggaggactttcagaaaaggtcttcaaggcaagcaagataactttccactggggaaaatgcaatgtgtcatctgaaggatcggaacatagcttagaaggacagaagttcccactggagatgcaagtctactgctttgatgcggacagattttccagttttgaggaagcagttaaaggaaaaggaagattaaggcgtttatccattttatttgaggttggagttgaagaaaatttggattacaaagccattattgatggaactgagagtgttagtcgttttggaaagcaggctgctttagatccattcgtcttgcagaacctcctgcaaaactccactgacaagtattacatttacaatggatcattgacatcccctccctgcacagacaccgtggaatggattgtttttaaggatacagttagcatctctgaaagccagctggctgtattttgtgaagttctcacaatgcaacagtctgggtatgtcatgttgatggattacttacaaaacaatttccgagaacaacagtacaagttttccaggcaggtgttttcctcatatactggaaaggaagagatccacgaagtagtgtgtagttcagaaccagaaaatgtgcaagctgaccctgagaattacaccagccttctggtcacatgggaaagacctcgggtcgtttatgacgccatgattgagaagtttgcagttctgtaccagccactggcgggaaatgaccaagccaagcatgagttcttaacagatggctatcaggacttgggtgccattctcaataatttactacctaacatgagttacgttcttcaaatagtggccgtatgctctaatggtttatatggaaagtacagtgaccaactgatagtggacatgcccactgaagatgccgaacttgacctttttcctgaattaattgggactgaagaaataatcaaggaggaagaatatggaaaagacaatgaagaagacactggcttgaatcctggtagagacagtgtcacaaaccaaataaggaaaaaggaaccccaggtttctaccacgactcactataatcacatggggactaaatacaatgaagccaagactaaccgatctccaacaagaggatctgaattctctggaaagagtgatgttcccaacacttccccgaattctacttcccaacatgttgctgaattcgaaacagaaagaggaatttccttgccttctcagactggaactaacctgccaccacacaatgtggaaggcacttcagcctccttaaacagtggctctaaaactctctttatcttcccacagatgaacttgtctgggactgcagaatccttaaatacggttcccataacagagtacaaagaggtttctgctgacgtcagtgaggaagaaaacttcctgactgatttcaagctcgatacgggagccgatgactcttcaggctccagcccctcaacctccactgtcccctttttctcagataatctatcccatggatacataacttcttcagacatgcccgaggctatcacgtatgatgtccttaagccaggatctacaagaaatgccccagaggattcagctccatcaggttcagaggaatcactaaaggatccatctcttgaagggagtgtatggtttcctggctccacagacctaacaacgcagtctgagactggatccggccgagagagctttctccaggttaactccacagacatacaaattgatgaatcgagggagacaaccgagtcgttttctccagatgctaccgtgtcacaggatccttcagtcacagacatgggaatgccacattattctacctttgcctacctcccaaccgaagtgacaccacaggctttcactccatcctccagaccacttgatttggctcctactatcaacatcctccattcgcagacgactcaaccagtatacaatggtgagacacctcttcaaccttcctacagtagtgaagtctttcctctagccacccctttgttgcttgacaatcagaccctcaacactacccctgctgcttcaagtagtgattcggccttgcatgctacgcctgtatcccccagtgttggtgtgtcatttgaatccatcctgtcttcctatgatgatgcacctctgctcccattttcctctgcttccttcagtagtgaaatgtttcgccatctgcatacggtttctcaaacccttccgcaagtcacttcagctgctgagagggatgagctgtctttgcatgcttctctgctggtggctaggggtgatttgctgttagaacccagccttgttcagtattctgatgtggcgtcacatcaggccactactcgtgctgcttcggacacattgggatttggtagtgagtctgctgtcttttataaaacgtccatggtttctcagattgaatcacccagaagtgatgttgttatgcatgcatactcttcggggcctgaaccttcttataccgttgagggctcccaccacgtacccactgtttcttacagttctgcaatgcctctgcatggttctgtcgatgtatctgatcaggggtccttacttatcaatcctagccatatatcaatgcctgagtcctcctttattactccaactgcatcattactgcagcctcctccagccctctctggtgatggggaatggtctggagcctcctctgatagtgaattgcttttacctgacgcagatgggctgagaactcttaacatttcttcacctgtttccgtagctgaatttacatatacgacatctgtgtttgctgatggtattaagccgctctctaaaagtgaaatgatgtatggaaatgagactgaactgaaaatgtcttctttcagtgacatggcatacccttctaaaagcacagttgtgccaaagatgtcagatgttgtacataagtggagtgaatctttaaaagaaacctctgtttctatttctagcatgaagagtgtgtttccagagtctcttgtttatcccacaactaagggttttgaacagggggttagtcacgttccagaaattatcttcccagttcaacctacacacactgcatctcaagcatctggggacacttggcttaaacccgggcttagcgcaaactcagaggcagcgttctcagacactgcttctagggaagtagtacacccttcaacacagcccttgctctatgaggccgcaactccttttaatactgaagcgttgctgcaaccttcctttcaggcttctgatgttgacaccttgcttaaaactgctctcccatctgtgcctagcgatccaatactggctggaaccccccaggttgaacaaagtagctcttccgtgtctcatcccatggcatcagagtctggttcaagcgaaagcatgctgcactttacgtctgtacctattctcgatatatcaccttctaaggtgcactccactccacttcaaggcttaacagttcctcactcgagtaagaaattttctgaacaaggtttgcttaagagcaaaagtccccagcaagtgctgccatctttgttcagcaatgacgagtttttccaaaacgcacatctggacgttagccaggcctatcctccaaaagggaggcatgcatttgttactcctgttttatcaattgatgaaccacaaaatacgcttataaacaagcttgtgtattctgaggacattttctcgagcactgagatttctattactgataaggtacttactggtctcccaacgcttgcttctgatgtactttcatctactgaccattctgttccattagggagtgggcccatttccttgacaatggtttctcccaacagagatgattctgtgaccacagccaagttgcttcttccttctacagctacttctaagctgactcagagcgccagatctgatgccgatttagtgggaggtggtgaagatggtgatgactatgatgatgatgactatgatgacatagataggggtcgctttcctgtgaataagtgtatgtcatgcttgccctatagagaatcccgggaaaaggtaatgaatgactcggacacccaggagagcagtcttgtggatcagagtgacccaatttcacctttactctttgagaatacagaagaagaaaatggaggcacaggtgtaactagggtggataagtcgccaccaccaagtatgctaccccagaatcacaatgatggaaaagaggacagtgacatccaaatgggtagtgctgtccttcctcataccccaggatctaaagcgtgggcagttttgacaagtgatgaagagagtgggtcagggcaaggcacctcagatagccttaatgataatgagacgtccacagatttcagttttccagatgttaatgaaaaggatactgatggtgtcctggaaacagatgacacaggcatagctccgggatctccacggtcctccacaccatctgttactagtgggcactcaggagtatccaacagttcagaggcaggttagttatgagcaaaggaaaagaatgagatgtgatgatttcttgctatgaaagtaaaaaaatagaagaatcgtggaagaaaggaattccggtccaccagcagaccttcactttttaaccagaacgttcaaccatttgtagctcctataaatataatttcactcatgatttcaaatgaatatccaacatatttttggtccttggtttaattatcttcaaaatacattgtttgtgtgttgttactaattcctattctacaggattcctattgtgtgtacaatcaattatatatgcataatacaccgttagtatattgcaatgcagtgtgctgtgttaagacaatttaaatgttcatacttgtattctaaaataagttgtaaaccaattctattggatttaaaatctcagtaatatgctatgagcacctatccaccaacagaaacaaaggagacacttcccatgtgcacatcaacgtggagagcttctaaaaaagaattacagggctatgatttgatagctaaggaaggttttgaaaaacatcatattgcttttaaaactatctttctttgagcttctttatgttgcctaaagagggcagtataaaccagcaaaatacattctacttcgtgtttgttacagtatttgtcattccggcttaaataatagacatgaatatgcatagtagtataggtattgtgtgacaagatgtaaaaagaaagaaagaaaaaaaagaaaaaagcctagagccttttctgtagggatgcatttcattgttaatatattttatgcaaattggtttattagccagatgtttcttgaagcagactgcaacatgcaatacagatgtgtgctttaaatgtcaatggcaaaaaaactcgagtttcattccattaagtgtataaaaaaaaagagagatgattccattgaattcggcaagaattttataatttgctttgattgagcgataaggtatttttttaattaacaaggagagaattgaaatcttagcaaattaaaagataagctaatgtgtaatgcaatattgggtaataattgcacagaactttatattcagaattcacagtatagagacaatctcattaaaatatatattctcttgtgttattttcatcattcacattagttgtaaactctttagtatggtggcaattaagagattatatatttagacagggcagcttcttttttctgtattctggcttgaactccatttaacgctgcatttcagcttcaatgtctgaactgatgtgtgagtgggactaatgagtccacgggtcactgtagtcaggagtgttgttacatatgtgaattgttatccatcctcaattatagcacttggttttctttctatatttttagatttatttgaaagggaaagatgatgaatatactctaatggagagaccatacatatataacaaagcactacatctagaattattgaagaaagtgatttctcttagatgtactaattagattttttttaactgttaagttccccccactaacgaaaaagaagcaatatggatataacacccatcttcaggaaataatataattaatgaaggaagtaggatcaaatagaattagggaaaacattttttacctattttaaaaactctatctgtaaaactaattcaaaatcagtcttacccaattattgaatattccctaacctgaacctcggcatttatgttacttctaaactgtagaaatactgacatgatgtttcttaatataatataatataaatagggcaaatatatatgagagtgaacacagtctgtaaggttcgtattctagttcacagaaagagtcaatgcaaaactaaccctgggaatgtattattagtgtctgtctctcagaacatgcttacatgattgagaacaataaaatatatttatgcttaaaaaaaaaaaaaaaaaaa

SEQ ID NO: 1262 - DNA, 490 bp, Mus musculus
tttttttttttttttttgaatagcaatatttatatttatttttgcaacttctcagataaaaaccatgtaaggaatgtttggtgaggtgttattctcataaaaacatcttttcaaacaagtggttttctattttcacaaaagtcaaaatgacatgcagaaacagggttagtttcttggataacacattacagttttagaagacatttagagtaagtaagaccagagagtaagctacattattaaactcaagtacaccactagaaaactcacacagtagtaaaatataaaaatctacaattataaatataaatttgggccatggagacaccagagcagtatttacataagttactatcactctacttcaggtgaatactgcagttgtaaaatgttgaatattatcggggatgaagtggtttacttacaatctactatattaaaagttatatttctagcaaatctgatgattgctacaaatacagctaaaaat

SEQ ID NO: 1263 - DNA, 962 bp, Mus musculus
gcaagcagatcctcagcgcccagtcgccgctctaagctcgcatctccactcccctcccctccaccgagccgtccacccggcgccatgcatcccgcgcgccccgcgctctgggcggctgcgctcactgccctcactctgctccgcggaccgccggtggccgagctggccgccggggcggtgggcgggcccgtggtgcgctgcgaaccgtgcgacgcgcgtgccgtgtcccagtgcgcgcctccgcccaccgcgcccgcgtgcacggagctggtgcgagagcccggctgcggctgctgcctgacttgcgcgctgcgcgaaggcgacgcgtgcggcgtctacacggagcgctgtggcaccggcctccgctgccagccgcggcccgcggagcagtacccgctgagggcgctgctgaatggccgcgggttctgcgccaacgccagcgctgcaggcagcctaagcacctacctcccctcccaacctgctccaggaaacatcagtgagtccgaggaggagcacaatgctgggagtgtggaaagccaggttgtccccagcacacaccgagtgaccgattccaagttccatccactccatgccaagatggatgtcatcaaaaaaggccacgccagggacagccagcgctacaaagttgactatgagtctcaaagcacagacacccagaacttctcctccgagtctaagcgggagacagaatacggtccctgccgcagagaaatggaggacacactgaatcatctgaagttcctcaatgtgctgagtcccagaggcgtccacatcccaaactgtgacaagaaggggttctataagaagaaacgatgccgcccttccaaaggcagaaagcagagcttctgctggtgtgtggacaagtatgggcagcgcttgccaggctacgacaccaaggggaaagacgacgtacattgcctcagcgtgcagagccagtagat

SEQ ID NO: 1264 - DNA, 1138 bp, Mus musculus
cacgaggaaaagccgggtggacccaggtgggtggccctccagtccacccagttaagggactgcctttttcccctccccctatccaccctggcttttaaggggccgggcagacctctgcttcttaaagaggagcccgcagcagcagctagactggactctctggaaggagtgtacagggcaaaaactctgaccatgacctgggatggcctgcccacacagccgctgctcatgctgctaatgctgttgttcgctgcgggctcagggtccgccttagcggggtgccccggctgcgggcctgggatgcagactggttgtcgcgggggctgcgtggaggaggaagacgcgggatcgcctgcagacggctgtacagaagccggaggctgtctcaggagagagggacaaccgtgcggggtctacagccctaagtgcgccccaggactgcagtgccaaccccgagagaacgaagagacgcctttgcgggcgctgctaatcggccagggccgctgtcaacgcgccagagggccgtcggaggagactacaaaggagagcaaaccccaaggaggtgcctcccgctctcgtgacacaaaccacagagaccggcagaagaatccacggacctctgctgcccctatacggcccaatcctgttcaagatagtgagatgggcccctgccgcagacacttggattcagtactgcagcagctccagactgaggtcttccgaggcggagcacgtgggctctatgtgccaaactgtgacctcagaggcttctaccgcaagcagcagtgtcgttcctcgcaggggaatcgccgtggcccctgctggtgtgtggatccgatgggccagcctttgccagtgtctccagatggtcaaggaagcactcagtgctctgccaggagcagtgggtgaagccccgagggagcctccaggacgccagcaggaacagggggctgtaatttgagctgtatgtgaagcaatgaataactctgtgcccaagacccaaccttcacgccccaccccattgtccctgtcacccttgggcctttacacagctagttagaaagattgctgttggcttgtgtactaataaaacagtattgggggggtgtctctggcttaaaaaaaaaaaaaaaaaaaa

SEQ ID NO: 1265 - DNA, 490 bp, Mus musculus
agtcctgctttgccaccatggaagcttggctgggcagtctcttattccttgctaccatggtgatagcatccaaagcagtatgttctattgaaaatcgtgagatatttccaaatcaaatgtctgatgactgcatggatgctgatggtaacaagcatttccttaacactccctggaagaagaactgcacgtggtgttcatgtgacaaaacgtcaatcacctgctgtaccaacgctactaggcctttgagctatgacaaagacaactgtgatgtacaattccacccagagaactgcacctacagtgtggtggatcggaagaacccagggaagacctgtcgagttgacagctggactatgtaaatgtgcttcgtgtgggcccaaaagtggagtaacatttgaaccttgtatgatttaaatttaccaatcataagcttgcaaggaggtgacctgtaatcccagcactcagaaggcagagccaggatgtcttgaaa

SEQ ID NO: 1266 - DNA, 1206 bp, Mus musculus
gcttcttcctaggtctctagcaagtggagccagagctgctacagaggagccttcaccatggagcagctgagttcagcgaacaccctcttcaccttggagctgttccacacactgaaggaaagcagccccacaggaaacatcttcttctctccatttagtatttcttcttccttggccatggtctttctgggagccaaaggcagcactgcagcccagctctctaagactcttcattttgactctgttgaggacatccattcatgctttcaaagcctgactgctgaagtgagcaagctgggagcatctcacactctgaaacttgctaacagactgtatggagagaaaacctacaatttccttcctgagttcttggcttccacccagaaaatgtacagtgctgacttggccgctgtggattttcagcatgcctctgaggatgcaaggaaggagataaaccaatgggtcaaaggtcaaacagaaggtaaaatcccagaactgctggctaagggtgtggtagacagcatgaccaaacttgtgctagtgaatgccatttacttcaaaggaatatgggaggagcaattcatgacaagagaaacaatcaatgctccattcagactgaataagaaagacacaaaaacagtgaagatgatgtatcaaaagaaaaaatttccattcggttacatttcggacctgaagtgcaaggtgctggagatgccttaccagggtggagaacttagcatggtcattctgctgcctgaagacattgaggatgagtccacgggtcttaagaagattgaggagcaattaactttgggaaaacttcatgaatggaccaaacatgagaacttgagaaacattgatgtccatgtcaaattgcccaggttcaagatggaagagagctacatactcaactctaacctgtgctgcctgggagtgcaggatctctttagtagtggcaaggctgatctctctggcatgtcaggatccagagatcttttcgtatcaaaaattgtccacaagtcatttgtggatgttaatgagcagggaacagaggcagctgctgccacaggaggcattattcaggtgctctgcgagaagatgcctactccacaggaagtattcactgtggatcacccattccttttctttattcggcacaaccccacagctaatatgatcttctttggcagggtttgttccccatag

SEQ ID NO: 1267 - DNA, 1250 bp, Mus musculus; identical to SEQ ID NO: 1045

SEQ ID NO: 1268 - DNA, 2999 bp, Mus musculus
tcaggctgcagcagagccccgagagctttgtgaaggaggaccgccgcacacccgcctccggcacacacagccaaccacagctgagcgacagccaacaagagccaatcacaaggcacctttgaatactcaggatgcagatgtcttcagcccttgcttgcctcatcctgggcctggttctggtctctgggaaagggttcactttacccctccgagaatcccacacagcccatcaggccaccgacttcggagtaaaagtgtttcagcaggtggtccaggcctccaaagaccggaatgtggtcttctctccctatggcgtgtcctcggtgctggctatgctgcagatgaccacagcggggaaaacccggcggcagatccaagatgctatgggattcaaagtcaatgagaagggcacagctcatgccctccgccagctctccaaggagctcatggggccgtggaacaagaatgagatcagtactgcggatgccatctttgtccagcgggacctagagctggtccagggcttcatgccccacttcttcaagctcttccagactatggtgaaacaggtggacttctcagaggtggaaagagccagatttatcatcaatgactgggtggaaaggcataccaaaggtatgatcaatgacttactggccaagggggctgtagacgagctgacacgcctggtgctggtgaatgccctctacttcagtggccaatggaagacccctttcttagaggccagcacccaccagcgcctcttccacaagtctgatggcagcaccgtctctgtgcccatgatggctcagagcaacaagttcaactacactgagttcaccacccccgatgggctcgagtatgacgtcgtggaactgccctaccagcgggacaccctcagcatgttcatcgctgcaccctttgagaaagatgtgcacctctccgccctcaccaacatcttggatgctgaactcatcagacaatggaagggcaacatgaccaggctgccccgcctcctcatcctgcctaagttctctctggagactgaagtggacctcagagggcccctggagaagttgggcatgcctgacatgtttagtgcaaccctggccgacttcacaagtctttccgaccaagagcagctctctgtagcacaggcactgcaaaaggtcaggatcgaggtaaacgagagcggcacagtggcgtcttcctccacagcctttgtcatctcagcccgcatggcccccacggagatggttatagaccgatcctttctctttgtggttcggcacaacccgacagagacaatcctcttcatggggcaagtgatggagccttgacagtgggaagagacgccttcatttggacgaaactggagatgttataagcagaaactctgaagaaaaggttatttaaaggactctatggggagaaagagaaggcaactcctccttaccccccacactggtaatctttccaaccagcatcccagacctcggactcttgaagggaaaagagtctaactccctcctccctagggattcctaccccacaaaggtctcatggaccatagaactcacagtacctggatctgcccagcatgccctttggacccagttcccaccgaggccccagcagagtggagggcacaacactttcattcagcaaaatcgtttgtgttccagtcacactgtgggcacctcttgcatcgcctgccattgctgtggagggtgccatgggccaaaggaaaaagcactgtcctatctcaaggtccactgtggaaatgtccaccttgcccacctccaaggggcaacggatagacagatcaaatggtggcccaatagcgagccttctccctgctccctcccttgacacagcttgcttatgttatttcagagtgtaggtgacttgtttacacagcttttttcgacccacaaacttttttcatttggaaagggtgtaagaaaagtcggacgtgtgtgtgcctggctcttcgtccccagtctcccagtgggggggccctggggagattccaggggtgtgattgaatatttatctcttgctcttgtatgtttgttggggagaagaagcacttttaaggaaaatgcttcttatttaaaccgtggcatacggcatcccatttggggtctgcatccctgtatgtcaggggtgcatcactccacaaacctgcccctctgggtagcctcgtgatggggctcacactgccgcctagtggcagccgaacacacccttacccggtccctccctccctccccccccccccccccccccgtggctctttttccttagggaccttgccaaggtgatgcttggcaacccacgttaaaggaaggggggaaaaaagattagatggaagagagagagatttgagagagggcaaagtggtttcaaatttttccaaggcatccagaagcagagagggaaaaggggctgtgtgacctaacaggacagaactttctccaattactgggtgagtcagagctgcactggtgactcacttcaatgtgtcatttccggctgctgtatgtgagcagtggacacgtgggggggcgggggggggatgaaagagacagcagctcctggtcaaccaccttagttagataatcttttttgaaagcttcctagctggaggtatgatcagaaaaccaatttactgaaaaactgcacaagaaggtaccgtgaatgaatttcctagcaggccactctgcatctgttatgtctccaccggaaaaaaaataatcatgttggtgtttttgcttttctctctctccctctttctctctgatttttttttcctctcttttcattatgcactggacagccacacaccgtgtaccatagggccccaaatgtggggtcacatggtcttgaattttgttggttacatatgcctttttgttgttgtttgtcttcacttttgatatataaacaggtaaatatgttttttaaaaaatactaaatatagagaatatgcaaac

SEQ ID NO: 1269 - DNA, 1432 bp, Mus musculus
ctccttcggctttttccccccttttgcatcttgtttcccgggatacctgcaactcaaggtctaaggtacaaattgcaatcctgtccatgcacttgtctctaacacaccagtgggtcctatctaaggaagcctttgaccttgagtcgtgaaactgtctctctgaccttggggtgcacatcctgtccgaggatggatgccctgagactggcaaattcagcttttgctgttgacttgttcaaacaactatgtgaaagggacccagcaggaaacattctcttctctccaatatgcctctctacttctctgtcccttgcgcaagtgggcaccaaaggcgacacagcaaatgaaattggacaggtccttcattttgagaatgtcaaagatgtaccctttgggtttcaaacagtcacttctgatgttaataagctcagttctttttactctttgaaacttgtcaagcgactctacatagacaaatctctgaacccttctacagaatttatcagttctaccaaaagaccatatgcaaaagaattggaaactgttgacttcaaagacaaactggaagaaacgaaaggtcaaattaacagctccattaaggagctcacagatggccactttgaggacattttgtcagagaacagtataagtgaccagaccaaaatccttgtggttaatgctgcctactttgttggaaagtggatgaagaaatttccggaatcagaaacaaaagaatgtcctttcagaatcagcaagacagacaccaaacccgtacaaatgatgaatcttgaggccactttctgcttgggtaacattgatgacatcagctgtaagatcatagaacttcctttccagaataagcatctgagtatgctcattgtgctccccaaggacgtggaggatgagtccacaggcctggagaagattgaacagcaactcaacccagaaacattgttacagtggaccaaccccagtaccatggccaatgccaaagtcaaactttccctcccaaagtttaaggtagaaaagatgattgatcccaaggctagtctggaaagcctagggctgaaaagtctcttcaatgaaagtacatcggatttctctggaatgtcagagaccaagggagtgtccctgtcaaatgtgattcatagagtatgcctagaaataaccgaagatggtggtgagtccatcgaggtgccagggtcccggatcttacagcacaaggatgaattcaatgctgaccatccatttatttatatcattagacacaacaaaactcgaaacatcattttctttggcaaattctgttctccttagctggcagggccttgccaagtctcagggaacttgtctgtagtcgcagagctctgtaaactttgtatccagacaatcactttctatacaataaattgtaaatgttgctgaatcagga

SEQ ID NO: 1270 - DNA, 1260 bp, Mus musculus
ggcgcgtctgttctgtggaacaggaggcagttgttttccgtccggcttctcccacaccgaagtgcgcgcctccacctcatggaagactcgatggatatggacatgagtcctcttaggcctcagaactaccttttcggctgtgaactaaaggctgacaaagactatcactttaaagtggataatgatgaaaatgagcaccagttgtcattaagaacggtcagtttaggagcaggggcaaaagatgagttacacatcgtagaggcagaagcaatgaactatgaaggcagtccaattaaagtaacactggcaactttgaaaatgtctgtacaaccaacagtttccctagggggctttgaaattacaccacctgtggtcttacggttgaagtgtggttcagggcctgtgcacattagtggacagcatctagtagctgtagaggaagatgcagagtctgaagatgaagatgaggaggacgtaaaactcttaggcatgtctggaaagcgatctgctcctggaggtggtaacaaggttccacagaaaaaagtaaaacttgatgaagatgatgaggacgatgatgaggacgatgaggatgatgaggatgatgatgatgatgattttgatgaagaggaaactgaagaaaaggtcccagtgaagaaatctgtacgagataccccagccaaaaatgcacaaaaatcaaaccaaaatggaaaagacttaaaaccatcaacaccgagatcaaagggtcaagagtccttcaaaaaacaggaaaagactcctaaaacaccaaaaggacctagttctgtagaagacattaaggcaaaaatgcaagcaagtatagaaaaaggcggttctcttcccaaagtggaagccaagttcattaattatgtgaagaattgtttccggatgactgaccaggaggctattcaagatctctggcagtggaggaaatctctttaagaaaagggtttaaacagtttgaaatattctgtcttcatttctgtaatagttaatatctggctgtcctttttataatgcaaagtgagaactttccctactgtgtttgataaatgttgtccaggttcacttgccaagaatgtgttgtctaaaatgcctgtttagttttcaaggatggaactccaccctttacttggttttaagtatgtatggaatgttatgataggacatagtaatagtggtcagatgtggaaatggtagggagacaaatatacatgtgaaataaactcagtattttaataaagt

SEQ ID NO: 1271 - DNA, 402 bp, Mus musculus
cccgtcttcaagacatcgtttgaaaggaaatctttcgtgacaatgccgtctgaactggagaaggccttgagcaacctcattgatgtctaccacaattattccaatatacaaggaaatcaccatgccctctacaagaatgacttcaagaaaatggtcactactgagtgtcctcagtttgtgcagaatataaatatcgaaaacttgttcagagaattggacatcaatagtgacaatgcaattaacttcgaggagttccttgcgatggtgataaaagtgggtgtggcatctcacaaagacagccacaaggagtagcagagcttctggcctagggctgggtccctggatatgtctacagaataaagtcatcatatctcaggtcaaaaaaaaaaaaaaaaaaaaaaa

SEQ ID NO: 1272 - DNA, 1260 bp, Mus musculus; identical to SEQ ID NO: 1270

SEQ ID NO: 1273 - DNA, 531 bp, Mus musculus
aaagcattttaataaaattaacaaataattattctaaactgtataggctacagggacaaggggtagaagctagagggccagtctttcctgctcaggccctcaagtcccctttagagagaccctgctctgggctggtttggggctaggactgctgacttggggaggcggggagtgaacccggaatgggtgatctgggctcttgcagccattcctctttgttggtgtaggggaggagagaagaggtcaaagaaagcaagaccctgcaagaggcatcccagtgacccccagaagtgactggggtaaggggagcgctatcctagaaggagggggtgggacggagggggcagtgaagcagggcggtgagcatggccagtggtgggcttcggccgcggttctacctgtggccactcactctcggacgtagaccctggtgcacacaacgtcatccgccgtcatggtcaggatcagttccccatcgttggtcagttctctggtccacgaggtcttggggccctctcccttcaggagctt

SEQ ID NO: 1274 - DNA, 868 bp, Mus musculus
gaattccggggaggatctgttctgcaaaggagacagcaaagtatctttagcctaaaggactcagcgtccagtgttctagttgaagatctaaagagaaagccaccttgctgccactatgcctaacttttctggcaactggaagatcatccgatcggaaaactttgaggaaatgctaaaagctctgggggtgaacatgatgatgaggaagatcgctgtggctgcagcctccaagccagcagtcgagatcaaacaggagaatgacactttctacatcaaaacctccaccactgtgcgaaccacggagattaacttcaagatcggggaggaatttgaggagcagaccgtggatgggagaccctgtaagagtttggtgaaatgggagagtggaaacaaaatggtgtgcgagcagaggcttctgaagggggagggccccaagacctcctggagccgagaactgaccaatgatggagagctgatcctgacaatgacagcagatgacgttgtgtgcaccagggtctacgtccgagagtgagtgcctacgggtccaagaactgcctgagacgacttctgtgcccgctacaggacacaaacctccctcccacgtccatcttacaaactagctctccccttactcctgagggttactgcttcctccaaggccttttgttctttgccttctctacgccagagaggggcagaagctcagaaccctcccaccgccatttgcccctcccaggtcagcagtcccagctccataccagggtccttcctggaagagactgtctctctggcctctactccttatccttgtagtctgtgtgatttagaatatttattggttaattttattaaaatgtttccggaattc

SEQ ID NO: 1275 - DNA, 513 bp, Mus musculus
gaactgcagacaccaaagggcagttaacaaatattccaggagtatgagacagaaggactgagagggaatgcaggagccacggtgtctttccgtgtggcttccccagaaggcagcctggagtccagcttctctggttccacagctctcttaggatgcccacactgaagcttctgtgtttgtgctagccatactttgaaatcagggttgaactgataaaataatttaaagacgtttactcccccttgaactttgaatctgtgaaatgcttttccttgtttacacgttggcagaattgcagtttgtctctgtttttgatccctgtactgtgttcctgacaggccctttgcagagttgctcaggtctgctgtaagtttctccatgcctgccctggtgcccacatcagaggctaaaccatctctttgttttgctctctatccgggccccacctcatgtccccagccaggtccaattccatttctcccattcacacggcacgctagtctgaaggtcctg

SEQ ID NO: 1276 - DNA, 132 bp, Mus musculus
cggcctgcacatggtgcatagcctacaggactcagaagcatggagtcactcttgcgctgcatcttctctaatccaaaagacacatttaatttcataaagaaacgaatgaaaagtgaaaaaaacctcgtgccg

SEQ ID NO: 1277 - DNA, 496 bp, Mus musculus
cgcacacagacatagacacacagacacagacacacatagacacagacacacacacagacaccaaagcctccaacctctaccatgaagatcgccatcacaatcactgtggtcatgctgtccatctgctgcagctcagcttcttcggacatctgcccaggatttcttcaagtccttgaggccctcctcatggaatcagagtctggttatgtggcatccctgaagcctttcaaccctggctcagacctgcaaaatgcgggcacccagctgaagagactggtggataccctcccacaagagaccaggataaacatcatgaagctcacggagaaaatcctaacaagtcctctgtgtaagcaagatttaagattctgaagctcactggatttcagagatattctactgctaaagccttgtcactgccctgtgtctcctcggctcctcggcttccccacaccaacccctccttcctctttgcaataaactgcgagcatctcac

SEQ ID NO: 1278 - DNA, 467 bp, Mus musculus
tttcagtagacaccatttattgagcacctgcagagtgctccatcctgtacaaaggattagggaggaaggaaagacatataatggaatagggggccatgctgtttagagccttgaagatccagcagccttgtgtgtggcccctcctgggtggtggagaaaaggccaaaagaaccgtggccaccctccccaccagatgttagatatcagatgaacttgtcccttatcacacacttttccctcctgcggagggaggggcatagaagtgggcaaggaacactggtggcctagtgactagtttggaaccctatactgactagatgtggatttgaaagtctacctcctgttggtatgtgcatcacatctaagttggtgccctggtactcagaggcccaggagagcagctctgagccttgctgggtcctcctttgtccggaaacaatcctcttctaagaatctctgactataag

SEQ ID NO: 1279 - DNA, 1818 bp, Mus musculus
gcaaaagttgcgagccgccgagtcccgggagacgctcgcccaggggggtccccgggaggaaaccacgggacagggaccaggagaggacctcagcctcacgccccagcctgcgccagccaacggaccggcctccctgctcccggtccatccaccatgcacttgctgtgcttcttgtctctggcgtgttccctgctcgccgctgcgctgatccccagtccgcgcgaggcgcccgccaccgtcgccgccttcgagtcgggactgggcttctcggaagcggagcccgacgggggcgaggtcaaggcttttgaaggcaaagacctggaggagcagttgcggtctgtgtccagcgtagatgagctgatgtctgtcctgtacccagactactggaaaatgtacaagtgccagctgcggaaaggcggctggcagcagcccaccctcaataccaggacaggggacagtgtaaaatttgctgctgcacattataacacagagatcctgaaaagtattgataatgagtggagaaagactcaatgcatgccacgtgaggtgtgtatagatgtggggaaggagtttggagcagccacaaacaccttctttaaacctccatgtgtgtccgtctacagatgtgggggttgctgcaacagcgaggggctgcagtgcatgaacaccagcacaggttacctcagcaagacgttgtttgaaattacagtgcctctctcacaaggccccaaaccagtcacaatcagttttgccaatcacacttcctgccggtgcatgtctaaactggatgtttacagacaagttcattcaattattagacgttctctgccagcaacattaccacagtgtcaggcagctaacaagacatgtccaacaaactatgtgtggaataactacatgtgccgatgcctggctcagcaggattttatcttttattcaaatgttgaagatgactcaaccaatggattccatgatgtctgtggacccaacaaggagctggatgaagacacctgtcagtgtgtctgcaagggggggcttcggccatctagttgtggaccccacaaagaactagatagagactcatgtcagtgtgtctgtaaaaacaaacttttccctaattcatgtggagccaacagggaatttgatgagaatacatgtcagtgtgtatgtaaaagaacgtgtccaagaaatcagcccctgaatcctgggaaatgtgcctgtgaatgtacagaaaacacacagaagtgcttccttaaagggaagaagttccaccatcaaacatgcagttgttacagaagaccgtgtgcgaatcgactgaagcattgtgatccaggactgtcctttagtgaagaagtatgccgctgtgtcccatcgtattggaaaaggccacatctgaactaagatcataccagttttcagtcagtcacagtcatttactctcttgaagactgttggaacagcacttagcactgtctatgcacagaaagactctgtgggaccacatggtaacagaggcccaagtctgtgtttattgaaccatgtggattactgcgggagaggactggcactcatgtgcaaaaaaaacctcttcaaagactggttttctgccagggaccagacagctgaggtttttctcttgtgatttaaaaaaagaatgactatataatttatttccactaaaaatattgttcctgcattcatttttatagcaataacaattggtaaagctcactgtgatcagtatttttataacatgcaaaactatgtttaaaataaaatgaaaattgtattataaaaaaaaaaaaaaaaaaaaaaaaa

SEQ ID NO: 1280 - DNA, 1255 bp, Mus musculus
ccaactgtcatccctggctgctgggcctcagatgcaatgcaggccatcaagtgtgtggtggtgggtgatggagccgtgggcaagacgtgtcttctcatcagctacaccaccaacgccttccctggagaatacatccccactgtatttgacaactactcagccaatgtgatggtggacagtaagccggtgaacctggggctgtgggataccgcaggtcaggaggactatgaccgcctccggccactctcctacccacagacagatgtatttctcatctgcttctcgctagtcagcccagcctcctatgagaatgtccgtgccaagtggttccctgaggtacggcaccactgccccagcacccccatcatcctggtgggtaccaagctggaccttcgcgatgacaaggacaccatcgagaagctgaaggagaagaagctggctcccatcacctacccgcagggcctggcactggccaaggatattgattcagtcaagtacttggaatgttctgcactcacccagcgaggcctgaagaccgtcttcgatgaggcaatccgcgcagtcctctgcccacagcccacacgacagcagaagcgcccctgcagcctgctctaggggtgtcacccagtcctcccatcccaatggtcctgaccctccagggtcccaccaaagctcagtgacgtgctggtggaattgctgtttctccgtgtggcgttctttcccagttagctgcagaacttgcctctctcctccacggaggtccctggggatgggcggatgttcataggccacatcctatttgggaggttcctatgttcccaggggccatcagggacccccaagacgcagccatccatcctcatacagagtcatatgcccacctgctccaggccttcctgacacctctctcgaagcttccggtctccatggcctgccactagtgtgttcgccatgttgggataccttcttccctgaaccaaagggagagatgtggaaatctgctcctctgttctcctttttcagaaaagcacagaacaaatctacttcagtaaatctctcatctgcccagccaagtgagggtctgagctcagccaacccctactgtctctcgagacctcctactctacttgaagggtagagctattccttcttgggactgtccactccacctgccagtcaggacccgatccatagcaaatggaaaatacagctctcttgcttacacagaaaataaatgtgttgattcttttggtgg

SEQ ID NO: 1281 - DNA, 1748 bp, Mus musculus
cgctcctacgattcacagccaccgcgccctcattcccttgttgcagtttttccagccgcagcaagccagcccaccttcgaagccatgtctaccaggtctgtgtcctcgtcctcctaccgcaggatgttcggtggctccggcacatcgagccggcccagctccaaccggagctatgtgaccacgtccacacgcacctacagtctgggcagcgcactgcgccccagcactagccgcagcctctattcctcatcccccggtggcgcctatgtgacccggtcctcggcagtgcgcctgcggagcagcgtgccgggcgtgcggctgcttcaagactcggtggacttctcgctggccgacgccatcaacactgagttcaagaacacccgcaccaacgagaaggtagaactgcaggagctgaatgaccgctttgccaactacatcgacaaggtgcgcttcctcgagcagcagaacaaaatcctgctggctgagctcgagcagctcaagggccagggcaagtcgcgcctgggcgacctgtacgaggaggagatgcgggagctgcgccggcaggtggatcagttcaccaacgacaaggcccgtgtcgaggtggagcgggacaacctggccgaggacatcatgcggctgcgagagaaattgcaggaggagatgctccagagagaggaagccgaaagcaccctgcagtcattcagacaggatgttgacaatgcttctctggcacgtcttgaccttgaacggaaagtggaatccttgcaggaagaaattgcctttttgaagaaactgcacgatgaagagatccaggagctgcaggcccagattcaggaacagcatgtccagatcgatgtggacgtttccaagcctgacctcactgctgccctgcgtgatgtgcgccagcagtatgaaagcgtggctgccaagaacctccaggaggccgaggaatggtacaagtccaagtttgctgacctctctgaggctgccaaccggaacaacgatgccctgcgccaggccaagcaggagtcaaacgagtaccggagacaggtgcagtcactcacctgtgaagtggatgcccttaaaggcactaacgagtccctggagcgccagatgcgtgagatggaagagaattttgcccttgaagctgctaactaccaggacactattggccgcctgcaggatgagatccaaaacatgaaggaagagatggctcgtcaccttcgtgaataccaagatctgctcaatgttaagatggccctggacattgagatcgccacctacaggaagctgctggaaggcgaggagagcaggatttctctgcctctgccaaccttttcttccctgaacctgagagaaactaacctggagtcacttcctctggttgacacccactcaaaaagaacactcctgattaagacggttgagaccagagatggacaggtgatcaatgagacttctcagcatcacgatgaccttgaataaaaattgcacacacttggtgcaacagtgcagtaccagcaagaaggaaaaaaaaaatcgtatcttaggaaaacagctttcaagtgcctttactgcagtttttcaggagcgcaagatagatttggaatagaaagaagctcagcacttaacaactgacaccccaaaacacgtagaaaaggtttacaaaataatctagtttacgaagaaatcttgtgctagaatactttttaaagtatttttgaataccattaaaactgcttttttcc

SEQ ID NO: 1282 - DNA, 934 bp, Mus musculus
agaagcctcagactccctctacagcatctgtggacccagccttaggtctctccaggatgtcagacaccgaagaacaagaatatgaggaggagcaggcagaagatgaggaagcggtggaggaggaggaagcccccgaggagccggagccggtggcagagcgagaagagcgccccaaacccagccgtcctgtggtgcctcctttgattcccccgaagattccagaaggggagcgtgtggattttgatgacatccaccggaagcgcatggagaaagacttactggagctgcagacgctcatcgacgtgcactttgaacagcggaaaaaggaggaggaagagctcattgcactaaaagaccgcattgagaggcgacgcgcagagagagctgagcaacagcgcttcagaacggaaaaggagcgagaacgccaggccaagctggcggaggagaagatgcggaaggaggaggaggaggcaaagaagagagcagaggatgacgccaagaagaagaaagttctgtccaacatgggagctcattttgggggctacctggtcaaggcagaacagaagcgtgggaagcgacagactggtcgggagatgaaactccggattctgtctgagaggaaaaagcccttgaacatcgactacatgggggaggaccagctccgggaaaaggcccaggagctgtcagaatggatccaccagctggaatcagaaaaatttgacctgatggagaagttgaagcaacagaaatatgagatcaatgtgctctacaaccgcatcagccacgcccagaaattccgaaagggggctgggaagggtcgagttggaggccgctggaagtgagactgccaggacatgacctgctgtgtggagcccaggagccactggagcgtgtcccatctgtaactcaaaataaagtgcccccaggcatctgc

SEQ ID NO: 1283 - DNA, 1404 bp, Mus musculus
atgtcccatcaacacacactgccagtgactgttccagctgtggttcagggacctctcaagactgtgtgttctccagatcatatccagcaggaacaagcaaagcaaccaactccacatcctacacaatgccaggtcttcactgagattcaagagaagggctttcccaaacatgaggagaagcggccaaaccctgtgaaggatctgcctgatcaaaagtgtgagcaccagcagcagccaggaccacaaaagcagcagctgcaggtgaaaaagtcacagcaggagctgcaggaacaggaactgcatctggagaagcagcagctaccacaagagccccaggggctcctgtgcctggaacaacaacagcagcaagagccacaaatgcaagaacagcacctcagacagcagcagcagcagcagcagcagcagcagcagcagcagcagcagcagcagcagcaagagacacaggagcagggtctgtgcctggggcagaagcagcagcagcagcagcaggacatgctagtaccacaggagctacatctgagacagcaccaggagaagctgcaggatccagaactgcatctgggtcagcagcagaaaactccagaggagcagaaactgattccaggagaaaagcagcaggagctgcacctgggacagaggcaccaggagccacaggagcaggagctacacctgggacagaaacagaagcagaagctacatgaaccagaactgcaactgggaaaacagcagcaccagaagccatctgagccagaactgcctctgggaaagcagcagcaggagtcacctgaaccagaactgcctctgggaaagcagcagcagcaggagtcacctgagccagaactgcaactgggaaagcagcagcagtcacatgagccggatatggcaggggatcagaaagagaagcagaaacttcataagccagaactgtacctgagaaagcagcagtaccaggagtcacctgacccagagttgtccctgggaaaacagcagcaccaggagtgtcaggaaccagaactgcaattggaagagaagcagcatcagaagccacctgaaccagaactgcacctgggaaagcagcaggagtcacatgagccagatatggcagaggatctggaagagaagcagaaacttggtgagccagaattacacctaggaaagcagcagcagcaacagatagagcgtgaaggttatcaaggaccaaaaagcctgggtcagtcacttaagcaagagaaagcttcaagggaacagcagctagattactcacatctagaacaggagaaggagctctcagaccagccactggatcaagcactagtaaagaagggtaaacaactggaaaggaagaaacacgaattggagaaccggacacagcaggagaagtag

SEQ ID NO: 1284 - DNA, 1159 bp, Mus musculus
cgctccgctgcctaagggcccctcgccaccgccaccatggacgccatcaagaagaagatgcagatgctgaagctcgacaaagagaacgccttggatcgagctgagcaagcggaggctgataagaaggcggcggaagaccggagcaagcagctggaagatgagctggtgtcactgcaaaagaaactcaagggcactgaagatgaactggacaaatactccgaggctctcaaagatgcccaggagaaactggagctggcggagaaaaaggccacagatgctgaagctgacgtagcttctctgaacagacgcatccagctggttgaggaggagttggatcgtgctcaggagcgtctggccacagctctgcagaagctggaggaggccgagaaggctgcagatgagagtgagagaggcatgaaagtcattgaaagccgagcccaaaaagatgaagaaaagatggagattcaggagatccagctgaaagaggccaagcacattgctgaagatgctgaccggaagtatgaagaggtggcccgtaagctggtcatcatcgagagcgacctggaacgtgcagaggagcgggctgagctctcagaaggcaaatgtgccgagcttgaagaagaattgaaaacggtgacgaacaacttgaagtcactggaggctcaggctgagaagtactctcagaaggaagacaaatatgaagaggagatcaaggttctctctgacaagctgaaggaggctgaaactcgggctgagtttgcagagagatcagtaaccaaattggagaaaagcattgatgacttagaagacgagctgtatgctcagaaactgaagtacaaggccatcagcgaggagctggaccacgctctcaacgatatgacttccatataagtttctttgcttcactcctcccaagactccttcgtcaagctggatgtcccacctctctgagctctgcatctgtctgctctccagctgacccaggtttctttttagcgcccacccaccttagggccaggcacagactgctttctattgtacagaagcaattcgcccagtgtaaaataaacactgtacgctattcctgtttgctattcttttactccttatttattgacattttcgtctcaacgctcaataaaactacacttctgcttcg

SEQ ID NO: 1285 - DNA, 688 bp, Mus musculus
cacactacctgtcctccatataccaggctcatccatctttgaagcatgagttcacatcagcagaagcagccctgcacagctcctccacagttgcatgagcaacaagtgaaacagccttgccagccaccacctcctgagccatgtgtctcacaagtcaagacaccctgtgacaccaaggttcctgagccctgccaccccaaggctcctgagccctgccatcccaaggctcctgagccctgccaccccaaggctcctgagccctgccaccccaaggctcctgagccctgccaccccaaggctcctgagccctgccaccccaaggctcctgaaccctgccaccccaaggctcctgagccctgccaccccaaggctcctgagccctgccaccccaaggttcctgagccctgccttcccaaggctcctgagccctgccaacccattgttcctgagccctgtccctcaactgtcactccaatactagcccaacagaagacaaagcaaaagtagtgcccaaaagctgtgccttggggagatgatcaacaatagatgctgagcctcaatttgcattctgtttgaatatactatgccctaatatcacagtcccacttctcatttatattttaaaattaagtactacaaagtttttttttttaatcctattaatgttggggctctgggtctagaattc

SEQ ID NO: 1286 - DNA, 615 bp, Mus musculus
tgccttttaaatgttaataatgtattgtgttcaaatttgagctccttggacccggatcagtcaggtcacatgatgctagttggccctggtagtgtttctgtgagtttgttcattgtacttggcacagtgatggggaaaaggtttaatttctatgcaaaacatatatgcaaaattagcaggtggctcacataagagaaccacaagacaggatgtacattctgaactggattttagagggaaaagtgctcatcttcttggttcattttgtaatatttaaattgccttttaaaactaaacttatacttttgctatcttttaatgctcatctggtttgaagatattcttgcttcctaccagtgtttactataaagtacagtaattactgactctatttcatgaaaacagttttgaaattgaatgtaacataaaccggaatcgatgttttctatggcactctcaaaaaattaatgttttcttaaagctgtatataaaaaatcctttaaaaactgttttgtaaatcctgtcagattttaatatttcagtccttattttgttatacattttcattctattcatcatgaattatataacatttcacacaataaaaaattattt

SEQ ID NO: 1287 - DNA, 1359 bp, Mus musculus
atggccaccacattcttgcaaacgtcttccacttttggaggcagctctacccgaggggcttccctccgtgctgggggaggcagctttggtggagggagtctctatgggggaggtggaagccgaagtatctctgcttcttctgctaggtttgtctcctcgggggcaggagggggctttgggggtggcatgagttgtggctttggtggtggttttggtggaggctttggtgggggttttggcggtggcttcggtgattttggtggtggcgatggaggtctcctctctggcaatgagaaggtgaccatgcagaaccttaatgaccgcctggcctcctacctggacaaggtgcgtgccctagagcaggccaacactgagctggaggtgaagatccgagattggtaccagaagcagagcccagccagtccagatcgggactacagccattactttaagaccatggaagagatccgggacaaaattctggctgccaccattgacaactcgcgcgttgtcctggagattgacaatgccaggctggcggcggacgacttcaggctcaagtatgagaatgagctgaccctgcgtcagggcgtggaggccgacatcaacggcttgcgccgggtgctggatgagctgaccctggccaggaccgacctggagatgcagattgagcagctgaacgaggagctggcttacctgaagaagaaccatgaggaggagatgaaggaattcagcagtcaactggctggccaggtcaatgtggaaatggacgcagcacccggggtggacctgacccgcatgctggcagagatgagggagcagtatgaagctattgcagagaaaaaccgtcgggatgtagaggcctggttcttcagtaagactgaagagctgaacaaggaggtggcgtctaacacagaaatgatccagaccagcaagacggagatcacagacctgagacggaccctgcaggggctagagattgagttgcagtctcagctcagcatgaaagccgggctggagaactctctggcagaggtggagtgccgctatgccacacagctgcagcagatccagggggtcattaccggtctggagactcagctgagtgagctccactctcagatggaggctcagaaccaggagtacaacatgctgctggacatcaagactcggctggaacaggagatcgccacttaccggaacctgctcgaggaccaggatgctaagatggctggtattggtgtcagagaaggaagcagcggtggcggtggcagcagtagcagcagcagcaatttccatatcagtgtggaggaatcagtggatggaaaagtggtttcttcccgtaagagagaaatctaa

SEQ ID NO: 1288 - DNA, 728 bp, Mus musculus
gttggaggcccaggcagccacgggaggcattgttgaccttcttagccgagaacggtactccgtacacaaggcggtggagcggggactcattgagaacacctccactcaacggctgctcaatgctcagaaggccttcaccggcatcgaggaccctgtcaccaggaagaggctgtcggtgggtgaggccatccagaagggctggatgccccaggaaagcgtgcttccccacctgctggtacagcacctgactgggggcctcatcgaccccaagaggacgggacgcatccccgtccctcaggctgtgctctgcgggatgatcagcgaagacctgggccagctcctgcaagatgaatccggctacgagaaggatctgacagaccccatcaccaaggagaggctgagctacaaggaggccatggggcgctgccgcaaagatcctctaagtggcctactactgctccccgccatgctagaaggctatcgctgctaccgcgcggcctcccccaccctgccaagatcctgtgtgcgttgatgaggggctctgcagagggggagggagaatgcacacgtcaccttgccctggagctgcgtaatccgaggcagcgggtcctcctcctgagtgtccacctcactgcgcaatcgtttgtggtgttgggctctgtccccaaatatgggaagttccgttgttcctccccaccccgtgcttctaataaatggattatctctgc

SEQ ID NO: 1289 - DNA, 1134 bp, Mus musculus
gtcgacgcagcaagcgctttggaaagttgagagcagctcgtggccccagaacaaagcttgagaaaaaccatggtgaatccgggcagcagctcgcagccgcccccggtgacggccggctccctctcctggaagcgctgcgcaggctgcgggggcaagatcgcggaccgctttctgctctatgccatggacagctactggcatagccgctgcctcaagtgctcctgctgccaggcgcagctgggcgacattggcacgtcctgttacaccaagagcggcatgatcctttgcagaaatgactacattaggttatttgggaatagcggtgcttgcagtgcctgtggacagtcgattcctgcaagtgagctcgtcatgagggcccaaggcaacgtgtatcatctcaagtgtttcacatgttctacctgccggaatcgcctggtcccgggagatcggtttcactacatcaatggcagtttattttgtgaacatgatagacccacagccctcatcaatggccatttgaattcacttcagagcaatccactactgccagaccagaaggtctgctgagaggtcagagtaatgcagaatgcgtgccttcatctcagaattgctcatcccaggtggatcccatgtgtctgcagtagaccagtcacctttgtagccagcaccatgccatcgcgccccctttagtcttgagtacccttcctgcatttattggtgtattaaaatgactgaatatgaacattaaggactccatgaacctgggctaatgggagatggtagcgaggatgaaaaaagatccaccgaaggacattaggggggagggtgcttgggggggggagggaaatgactaatgaagctaattaaacgaagcatcaccaatctgctttctaccctcattaacaattagcagggccccggccagagtgtgagccctgttttactttaacaacattctgtttgctctttgtatatttaagtgttgtaatgaaatgtgtttcaatcaacctgaacatgagttaaaaggaaagagatgtggcttttgtgataattctatcacaaacacttttattgtatctctgtaaaatacaatgtatgtatgcatgtgagtgttcttgtcctgatgttgccccg

SEQ ID NO: 1290 - DNA, 5214 bp, Mus musculus
agacacaagcgagaggatcatggcggatggccccaggtgtaagcgcagaaagcaggcgaacccgcggcgcaataacgttacaaattataatactgtggtagaagcaaattcagattccgatgatgaagacaaactccatattgtggaagaagaaagtattacagatgcagctgactgtgaaggtggcatgccagatgatgaactgccagcagaccagacagtattaccaggaggcagtgacagggggggcggtgccaagaactgctggcaagacaacgtgaaagacaacgagtgtgactcagatgcagaaaatgagcaaaaccatgatccgaatgtggaagaatttctgcagcaacaagacaccgccgtcatttatcctgaggcgcccgaggaagaccagcggcagggcacaccagaagccagcagtcatgatgaaaacggaacaccagatgcattttcccagttgctcacctgcccgtattgtgatagaggctacaagcgctttacctctttgaaagaacacattaagtaccgccatgagaagaacgaggacaacttcagctgctccctgtgcagttacacctttgcatacagaacccagcttgaacgtcatatgacatcacataagtcaggaagagagcaaagacatgtgacacagtctgggggaaaccgcaagttcaagtgcactgaatgcgggaaggccttcaagtacaaacaccacctgaaagagcacttacggattcacagtggagagaagccatacgaatgcccgaactgcaagaaacggttttcccattctggctcctatagctcacatataagcagtaagaagtgtattagcttgatgcctgtgaatggcaggcctagatcaggactcaagacatctcagtgttcctcgccatctctttcgacatcaccaggcagtcccacacgcccacagatacgacagaagatagagaataaaccccttcaagaaccgctttctgtaaaccaaatcaaaactgaacctgtggattatgagttcaaacccatagtggttgcttcaggaatcaactgttcaacccctttacaaaatggggtttttagcagtggtggccaattgcaggcaaccagttctcctcagggtgtggtgcaagccgttgttctgccaacagttggtttggtatctcccataagtatcaacttaagtgacattcagaatgtacttaaagtggctgtagatggtaacgtaatacgacaagtcttggagactaatcaagccagtcttgcatccaaagagcaagaagcagtgagtgcttcgcccatccagcagggtggccattctgtcatttctgccatcagtcttcctttagttgatcaggatggaacaaccaaaatcatcatcaactacagtcttgagcagcccagtcaacttcaggttgttccccagaatttaaagaaagaaatcccagcccctacaaacagctgcaaaagtgagaagttaccagaagaccttactgtcaaatcagaaacggacaaaagctttgagggggccagggatgatagcacttgccttctgtgtgaggactgcccaggggacctcaatgcacttccagaactaaagcactatgacccagagtgccctgctcagcctccaccccctgccccagccaccgagaagccagagtcctctgcttcatcagctggaaacggagatttgtctcccagtcagccacctttaaagaaccttctgtcactcttgaaagcctactatgctctgaacgcgcagccaagcacagaagagctctcaaagatcgccgattctgtgaacctaccgctggatggagttaaaaagtggtttgaaaagatgcaagctggacagattccaggacagtctcctgaccccccttctcctggaaccgggtcagtaaacatacctacaaaaaccgatgagcagcctcaacctgcggatggaaatgagccccaggaagacagcacacgcggacagagtcctgtcaagataaggagctctccggttttacctgtaggatcagccatgaacggttccagaagctgcacatcatccccatcccctctaaacctttgctcagccaggaacccgcagggttactcttgtgtggcagagggtgcccaggaggagccccaagtagaacctcttgatctctcactaccaaagcaacagggagagttactggaaaggtcgacagtcagtagcgtttaccagaacagtgtttattctgtccaggaagaacccttgaacttgtcttgtgcaaaaaaggaaccacaaaaggacagctgtgttacagactcagaaccagttgtaaatgtagtcccaccaagtgccaaccccataaacattgctattcctacagtcactgcccagttacccacaatcgtggccattgctgaccagaacagtgttccatgtttaagagcactggccgccaacaagcagactattctgattccccaagtggcatatacatattcagctactgtgagccctgccgtgcaggagccgccagtgaaggtgatccagccaaacggaaaccaggatgaaagacaagacactagctcagaaggagtctccactgtggaggaccagaatgactctgactccacgccacccaaaaagaaaactcggaagacagagaatggaatgtatgcatgtgacctgtgtgacaagatatttcagaagagcagctcactgttgagacacaaatatgagcacacaggtaagaggcctcacgagtgtggaatctgtagaaaggcatttaaacacaagcatcatttgattgagcacatgcggctgcactctggggaaaagccctatcaatgtgacaagtgtggcaagcgcttctcacactccggctcctactctcaacacatgaatcaccgctactcctactgcaagagaggagctgaagacagagatgctatggagcaggaagacgctgggcccgaagtcctgccggaagtcctggcgactgagcatgttggtgcccgggcgtctccctcacaggctgactcggacgagagagaaagtctgacaagggaagaagatgaagacagtgaaaaggaggaggaggaggaagataaagagatggaagaattacaggaaggaaaggaatgtgagaacccacagggggaggaggaggaggaggaggaggaggaagaggaggaagaagaggaggaagaggaggaagtggaagcggatgaagccgagcatgaggcagcagccaagactgatggtacagtggaggttggagctgcacagcaggcaggcagcttagagcagaaggccagcgagagcgagatggagagcgaaagcgagagtgagcagctgtctgaagagaagacaaatgaagcttaggagttcttctaaaaggaaattctacttggtaatgaaatttgctctatattacccacgcttttcatggaaacatggctccatggctcctgtgctatggttcctgctcactactgtgtaatgtcagaactgaaaaaaaaaaattccgggtgtgcctgaacctcaaacctagtaatttttcatgcagttttcaaagttaggaacaaatttataacatgaagcagcttagaaaacattaatgactcagaaaacaaaggtttctcagcaggttacaggaggctggatgggcgtccggcatggctagcagtattatcactcttacgttggctcattcttaagctctacaatgggagaaattttataatttttttattggtaaacatatgctaaatccgcttcagtattttattatgttttttaaaatgtgagaacttctgcactacagaattcccttcacagagcagtagaaagcagttcaaaccgcgctggctacctgctgctacccagtcagtcaggagataggacctctgacgttagatgccgtgttgccatctaacatgtattgctagccttaaggaagcagccagagaagagctggagtttcttactcgtgtgatttttaaatggagttcaaggttgtcgtgagtcctgactccagggacgaccagtgttgatgtggcaaggccggcagaggcggcagaatcagtgttcgtgattgtttgcgtacgttagcaaccatgaaggatctataggaagcaagcgctgtgtccctttggccttaagcaagacctgtgctctaagtgccattctcagtattgcaaggctctgacagccttcccgcagtgtggcctatattaactagcagttgttgattcgtttgttgtgtcaaaattcccaaacaaaactcaaaaccactgactgtgagagaagctgaagcactggggcatctcacacttttgttcctcagtagtcatttcatgttgattgactctcagaagtctctacagaaataaaagggaaattctccaaactacttaatccatgtacttgcgtgtcaggcatggatacgctattggtttttggttcacagccgttttccaaatgttagttattacggacccaggtgatgaacaacagcagctgatttttacctaccagtattattttatttctttagtttatagatctgtgcaacatttttgtactgtatgtctttaagcctggcagtattaatacccttcttactgacacgtacttttagttttagaaaacttttatatttatgtgtcttatttttatatttctttatttattacacagtgtagtgtataatactgtagtttgtattaatacaataatatattttagtatgaaattttggaaagttgctaagatttacagtagagatgcagttggttcccgtgcgttgagatttgatttaacagcgttctgttaacatttatacttgcctccgactgtagaccagcctttaaatgggaaggtattagttttacaactacaatcaagtcattctccctttccccagtttttaataggaaactcttacactttgacactcactgtgtgcgactcatagcatgccgctctgcagtcttctgttaagagttggcccagccataactcattcccttagcaagccaaaatagaattgccttctgtaaacagtgttgggggcaatgtttaacatgtgccaatttgttcctgtatccatgaatgtaagctaccaatctgactcttccttttaagttccttgttacaccatggtcattttctagttttttaccagactccccagctcacaataaacgcatcaacaaacctga

SEQ ID NO: 1291 - DNA, 1185 bp, Mus musculus
gtacacgctggatgcctctctccgatccaccccactcactcgctcctctctcacctcctctctcacctcctctctctccctcctctctcacctcctctctccctctctcctgcattgattttttttctctcctttttttagttgactgaaacaaaacaaaacaaaagggccactggatgtctgccttcttggggggtgagccagacagactgacaaacaaacagacccagctgagctcgggggagggtttctcctccggttttgcccggcagcagcagcatggacgtgttggctagttatagtatattccaggagctacaacttgtccacgacaccggctacttctcagctttgccatccctggaggagacctggcagcagacatgccttgagttggaacgctacctccagacagaaccccggcggatctcggagacctttggtgaggacttggactgcttcctccacgcttctcctcccccatgcattgaggagagcttccggcgcctagaccccttgctgctcccagtggaagccaccatctgcgagaagagctccgcagtggacattttgctctctcgggacaagttgctatctgagacctgcctcagcctccagccaaccagctcttctctagacagctacacagccgtcaaccaggcccagctcaacgcagtgacctcattaacgccgccctcatcccctgagctcagccgccatctggtcaaaacctcacagactctctcagccgtggatggcacagtgacgttgaaactggtggccaagaaggcttccctcagcccggtgaaggtgggaggggtggcggcggcggcagccgtgacaccagctggagcagttaagagtggacagagcgacagtgagcaaggagggggaggggctgacacatgccctgaaaacaagaagagggtccatcgctgtcagtttaacgggtgccggaaagtttatacaaaaagctcccacttaaaggcccaccagaggactcacacaggtgagaagccttacaagtgctcatgggaaggatgcgagtggcgttttgcacggagcgatgagctcacaaggcactacaggaaacacacaggtgcaaagccctttaagtgtaaccactgcgacaggtgtttctccaggtctgaccacctcgcgctccacatgaagagacatatctaa

SEQ ID NO: 1292 - DNA, 1274 bp, Mus musculus
ggaattccggctgaggctgagctcacccggccagctcaaagcagccaggcggcgctacaagactttcatgatcgatgagatcctctccaaggagacctgcgactactttgagaaactttccctctactctgtgtgcccgtcgctggtggtgcgacccaagcccctgcactcttgtaccggttccccttccctacgggcatatcctctcccgtctgtgatcacccggcagcccacagtcatctcccacctggttcccaccggctcgggactcaccccagtgttaactcgccatccagtcgccgctgcggaggcggcggctgctgctgctgagacccctggtggtgaggcgttagccagcagcgagtcagagacagaacagcccacgcccaggcagaagaaaccacgcagaagtcgcaccatcttcaccgagctgcagctcatgggcctagagaagaaattccagaagcagaagtatttgtctaccccagacaggttggacttggcccagtctctgggactcactcagctgcaagtgaagacttggtatcagaatcgcaggatgaaatggaagaagatggtccttaaaggtggacaggaagcacccacaaaacctaaggggcgccctaagaagaattccattcccacatcagaggagattgaagctgaagagaagatgaacagccaggctcagagccaggagctgctggaatcctcggagagagaagcttcctctgaacccccaccattaagctaaaataaagttctttgaggggaagggggagctgggaagaagggaagagagaggcaaggagaatgagggagagaagacctctaaagactagtaacgtgggtagaggagcacttctggtctcccacgtcccagcgtcattttcatcggaagcatttgatgaagactcgattgtgtgggacttaaccttcttgcaaggctgtgttaggcacagatacccttctgtaagggagatagcgccttggatctgattgcccaggcttgggtgatagctgcagggctggctacagcagctccgctggcctgcagcaagggctgctcttctccctccttgctctcctctgggcaacaggtcagccaagcagagagaggtaggtggaagtgctcgggagacctgcccagactccttgctgactcggcgcttatttctgtagttttaagagaattgaattttttttttttttgagggtggggtcgggtggggaaagctgttaaaggcagacaaaaaaaaaaaaaccggaattcc

SEQ ID NO: 1293 - DNA, 927 bp, Mus musculus
attgtacaacctttctccaacttcttgttctcttcccacactctgttctcagcctcctccgctcccctccgcctgttctcaggatcatgaaggtcgccagtggcagtgccgcagccgctgcaggccctagctgttcgctgaaggcgggcaggacagcgggcgaggtggtacttggtctgtcggagcaaagcgtggccatctcgcgctgcgctgggacgcgcctgcccgccttgctggacgagcagcaggtgaacgtcctgctctacgacatgaacggctgctactcacgcctcaaggagctggtgcccaccctgccccagaaccgcaaagtgagcaaggtggagatcctgcagcatgtaatcgactacatcagggacctgcagctggagctgaactcggagtctgaagtcgggaccaccggaggccggggactgcctgtccgcgccccgctcagcaccctgaacggcgagatcagtgccttggcggccgaggcggcatgtgttccagccgacgatcgcatcttgtgtcgctgaggcggcgcactgagggaccagatggactccagcccttcaggaggcaagaggaaaaaagtgctctcggttccccaggggatctctgggaaagacactaccgcagccaccggactcttggcggatcggtccagtgggtagagggtttgatcaacagagcctcaccctctccacctttcagcctccagagactttggggagggggttaatcaaccccgcgtgtttctgttttattgaaaaagcagacattttttttaaatggtcacatttcgtgcttctcggatttctgaggaaatattttatattgtatattacaatgatcactggctgaaaatattgttttacaatagttctatgggggtgggttttttgttgttattaaacaaacactttagat

SEQ ID NO: 1294 - DNA, 2024 bp, Mus musculus
agtgcagtggttgcacgggagtgcgggctgcacgcgtcaccgtcaccgccgcctgtcccccaccgccgcgcagcgccgatctccctcccggtttcggccgccacctggggatccaagcgaggacgggctgtccttgttggaaggaaccatgaattggcattttcctttcttcatcttgaccacagtgactttatactctgtgcactcccagttcaactctctgtcactggaggaactaggctccaacacagggatccaggtcttcaatcagatcatcaagtcacggcctcatgagaacgttgttgtctccccacatgggatcgcgtccatcttgggcatgctgcagctcggggctgacggcaagacaaagaagcagctctccacggtgatgcgatataatgtaaacggagttggtaaagtgctgaagaagatcaacaaggctattgtctccaagaaaaataaagacattgtgaccgtggccaatgctgtgtttctcaggaatggctttaaaatggaagtgccttttgcagtaaggaacaaagatgtgtttcagtgtgaagtgcagaatgtgaacttccaggacccagcctctgcctctgagtccatcaatttttgggtcaaaaatgagaccaggggcatgattgataatctgctttccccaaatctgatcgatggtgcccttaccaggctggtcctcgttaatgcagtgtatttcaagggtttgtggaagtctcggtttcaaccagagagcacaaagaaacggacattcgtggcaggtgatgggaaatcctaccaagtacccatgttggctcagctctctgtgttccgctcagggtctaccaggaccccgaatggcttatggtacaacttcattgagctgccctaccatggtgagagcatcagcatgctgatcgccctgccaacagagagctccaccccactgtctgccatcatccctcacatcactaccaagaccattgatagctggatgaacaccatggtacccaagaggatgcagctggtcctacccaagttcacagctgtggcacaaacagatctgaaggagccactgaaagcccttggcattactgagatgtttgagccatcaaaggcaaattttacaaaaataacaaggtcagagagccttcatgtctctcacatcttgcaaaaagcaaaaattgaagtcagtgaagatggaaccaaagcttcagcagcaacaactgcaatcctaattgcaaggtcatcacctccctggtttatagtagacaggcctttcctgttttccatccgacacaatcccacaggtgccatcttgttcctgggccaggtgaacaagccctgaaggacagacaaaggaaagccacgcaaagccaagacgacttggctctgaagagagactccctccccacatctttcatagttctgttaaatatttttatatactgctttcttttttgaaactggttcatagcagcagttaagtgacgcaagtgtttctggtcggggctgtgtcagaagaaagggctggatgcctgggatgctggatgcctgggatgctggatgcctgggatgctggatgcctgggatgctggatgcctgggatgctggatgcctgggatgctgtagtgaaggatgagcaggccggtttcacgatgtctagaagatttctttaaactactgatcagttatctaggttaacaaccctctcgagtatttgctgtctgtcaagttcagcatctttgtttcattcctgttgatatgtgtgactttccaggagaggattaatcagtgtggcaggagaggttaaaaaaaaaaaagacattttatagtagtttttatgtttttatggaaaacaatatcatttgcctttttaattctttttcctctcacttccacccaaaggcttgagggtggcaagggatggagctagcaaaagccgtagcctcttcgtgtgttgtttctgttgctgttgctcttgttgttttatatactgcatgtgttcactaaaataaagttggaaaact

SEQ ID NO: 1295 - DNA, 5400 bp, Mus musculus
ttcggagagggccgctataaaggcttgttttgctcagggtccgatgttcgcgagcgtgcccgggctgtttgctctcgtgtggggaggctggggtgcagaatttctgaagtgaaaggaggagtctgcaccctggtcctctgtgtggtgaagatgaaagatattgacatgggaaaagaatatatcatccccagccctgggtacagaagtgacagggacagaagcgctgtaccagggcaacacagagaccccgaggaacccaggttccggagaacaagatcgttggaatgccaagatgctctcgaaacagcagcccgagttgaggggctttccctggatatctctgtgcattctcatctccaaattctggacgaggagcattctaagggaaaataccaccatggtttaagtgtcctgaagcccttccggaccactaccaagcaccagcacccagtggacaatgctggacttttctcctacatgaccttttcatggctctctcctctggcccgagtggttcacaagaagggggagctgttaatggaggatgtgtggcctttgtccaagtatgagtcttctgatgtgaactgcagaagactagagagactgtggcaagaagagctgaatgaagttgggccagacgctgcttccctgcgaagggttgtgtggatcttctgccgcaccaggctcatcctgtccatcgtgtgcctgatgatcacgcagctggctggcttcagtggaccagccttcatggtgaaacacctcttggagtatacccaggcaacagagtctaacctgcagtgcagcttgttgttagtgctgggcctcctcctgacggaaatcgtgcggtcttggtcgcttgcactgacttgggcattgaattaccgaaccggtgtccgcttgcggggggccatcctaaccatggcatttaagaagatccttaagttaaagaacattaaagagaaatccctgggtgagctcatcaacatttgctccaacgatgggcagagaatgtttgaggcagcagccgttggcagcctgctggctggaggacctgttgttgccatcttgggcatgatttataatgtaatcatcctaggacccacgggcttcctgggatcagcggtttttatcctcttttatccagcaatgatgttcgtgtcacggctaactgcatatttcaggagaaagcgtgtagctgccacagatgaccgtgtccagaagatgaatgaagttcttacctacattaaattcattaaaatgtatgcctgggtcaaagcgttttctcagtgtgtgcaaaaaatccgagaggaggaacgtcggatattggagaaagccgggtactttcagagcatcactgttggagtggctcctattgtggtagtgatcgccagtgtggtgacgttctccgttcacatgaccctgggcttccatctgactgcggcacaggccttcacagtggtgactgtcttcaattccatgacttttgctttgaaagtaacaccattctcagtgaagtccctctctgaagcatcagtggctgttgacagatttaagagtttgtttctaatggaagaggttcacatgataaagaacaaaccggccagtcctcacatcaagatagagatgaaaaatgccaccttggcatgggactcctcccactccagtatacagaactcgcccaagctgacccccaaaatgaaaaaagacaagagggctaccaggggcaagaaagagaagtcgaggcagctgcaacacactgagcaccaggcggtgctggcagaacagaaaggacacctcctcctggacagcgacgagcggcccagcccggaagaggaagaaggcaagcagatccacacagggagcctgcgcctgcagaggacactgtacaacattgacttagaaattgaagagggcaaactggttggaatctgcggcagtgtgggaagtggaaaaacctctctcgtttcagccattttaggccagatgacgcttttggagggcagcattgccgtcagtgggacctttgcttatgtggcccaacaggcctggattctcaatgccactctgagagacaacattctctttgggaaggaatttgatgaagagagatacaactcagtgctgaatagctgctgcctgcggcctgacttggccattctccccaacagcgacctgactgagattggagagcgaggagccaacctgagtggtggacagcgccagagaatcagccttgctagagccttgtacagtgatagaagcatctacatcctggatgaccccctcagtgccttagatgcccatgtgggcaaccacatcttcaacagtgctatccggaagcgcctcaagtctaagacggttctgtttgttacacaccagttacagtatctggtcgattgtgatgaggtgatcttcatgaaggaaggctgtatcacagagagaggtacccatgaggagctgatgaacttaaatggggattacgctacgatttttaataacctgttgctgggagagacacccccagttgagattaattcgaaaaaggaagctactggttcacaaaaatcacaagacaagggccctaagccagggtcagtgaagaaggagaaggcggtgaagtcggaggaagggcagcttgtgcaggtggaggagaaagggcaaggttctgtgccttggtcagtctactgggtctacatccaggctgcagggggccccttggctttcctggtcatcatggtcctcttcatgctgaatgtgggcagcactgccttcagcacctggtggcttagctactggatcaagcaaggaagcgggaacagcacagtgtatcaagggaacagaagcttcgtgagtgacagcatgaaggacaaccccttcatgcagtactacgccagcatctacgccctctccatggcagtcatgctgatcttgaaagccattcgaggagttgtcttcgtcaagggcacactgagagcctcctcccggctccatgatgagctattccgaaggatccttaggagccccatgaagttttttgatactaccccaacaggaaggattctcaacaggttttccaaagacatggatgaagtggatgtgcggctgccgttccaggctgagatgtttattcagaatgtaatcctggtgttcttctgtgttggaatgattgctggagtcttcccatggttcctcgtggcggtggggcctctcctcatcctcttctcacttctccacattgtctccagggtcctgattcgtgagctaaagcggttggacaatatcacgcagtctcctttcctctcccacatcacgtctagcattcagggcctggccaccatccatgcctacaacaaaaggcaggagtttttacacaggtatcaggagctcctggatgacaaccaggctccctttttcctgttcacctgtgcaatgaggtggctgccagtgcggctggacatcatcagcattgccttgattaccagcactggcctgatgattgtctcaggcatggccagatccctttcagcctatgcggggcttgccatttcctacgctgtgcagttaattggactattccagttcaccgtcagactggcatcggagacagaagcacggttcacttccgtggagaggatcaaccactatatcaagactctctctttggaagcacctgccagaatcaagaacaaggctcctccccatgactggccccaggagggagaagtaacctttgagaatgcagaaatgagataccgggaaaatctccctctggtccttaagaaagtgtccttcaccatcaagcccaaggaaaagataggcattgtgggacgaacagggtcagggaagtcctctttggggatggccctcttccgtctggtggagctatctggaggctgcatcaagattgatggaataagaatcagtgacatcggcctggccgacctccgaagcaaactggccatcattcctcaggagccagtgctgttcagtggcactgtcagatcaaacctggaccctttcaaccagtacacggaagaccagatctgggatgctctagagagaacgcacatgaaggaatgtattgcccagctacctctgaaacttgagtctgaagtaatggagaacggggacaacttctctgttggggaacggcagctgttgtgcatagcaagagccctgctgcgtcactgtaagattctgattttagatgaagctacagccgctatggacacagagacagacttactgatccaggagaccatccgggaagcatttgcggactgcaccatgctgaccattgcccatcgcctgcacacagttctgggctctgacaggatcatggtgctggcccagggacaggtggtggagtttgacaccccatcggtccttctgtctaatgacagttcaagattctatgccatgtttgctgctgcagagaacaaggtggctgtcaagggctgagtcctcccgtcctcgaagtctcttcctcagagcattgccattctcttcctggtttgggcccctcatcctgtcctgctgaaacttcgcctttcccagttttatctctcacacaaccattcaggattagctgtgtgtttcacttttaaggaaagtcatattttgattattgtatttattccctattcacttaaatgaaatttagtttttgttcttaattgcactcttaagaggttcagggaaccattactataaatgttatcagtggcctataatgaagctttatatgtgtagctatgtctatatataattctgtacatagcctatatttacagtaaaatgtaagcggcccggaattctcagggctcctgctttcctgtcttggtgtcagctgctgtttatgttagagcagtgggcaaagccagcccccacccagtctgctcccagtgttccatgcttcaggttcctgaggctggtcgccacagagttgtcgagttccctggccagctggttcccagccccagggtccactgctgctgttgtaggtggcattttcatttgcctgaccccaaggctccagagctcagcaacagggctcaggatggtggggtccgttcttcctcactttagtctcctctgcaaagtctgcacccacccctcagcagctcttgctaatcagtgtctcacactggtgtagaagttttttgtactgtaaagagacctacctcaggttgctgattgctgtgtggtttggtgcgctcttgcagacccccttgtgctctggggctcgtagcttgggtgggtgtggttgccactgtcaccagtcgagtggtcagcgtcgcatgtcgtgaccaactagacattctgtcgccttagcatgtttgctaaataccttataaaagcaaaaatatgaaaaagtgaataaaattattttggatttgt

SEQ ID NO: 1296 - DNA, 3071 bp, Mus musculus
cagcacttttctttcattgggggaaaggcgtgagggaagtacccaacagcagcagactttgaaactttaaacagacaggtctgagagcccgaactctccttttcctttgacttcagcctccaaggagttccaccactttggcgtgccggcttcactttcattaagtgaaagagaggtgcccagacatgggtgactggagcgccttggggaagctgctggacaaggtccaagcctactccacggccggagggaaggtgtggctgtcggtgctcttcattttcagaatcctgctcctggggacagcggttgagtcagcttggggtgatgaacagtctgcctttcgctgtaacactcaacaacccggttgtgaaaatgtctgctatgacaagtccttccccatctctcacgtgcgcttctgggtccttcagatcatattcgtgtctgtgcccacactcctgtacttggctcacgtgttctatgtgatgagaaaggaagagaagctgaacaagaaagaagaggagctcaaagtggcgcagaccgacggggtcaacgtggagatgcacctgaagcagattgaaatcaagaagttcaagtatgggattgaagaacacggcaaggtgaagatgagaggtggcctgctgagaacctacatcatcagcatcctcttcaagtctgtcttcgaggtggccttcctgctgatccagtggtacatctatgggttcagcctgagtgcggtctacacctgcaagagagatccctgcccccaccaggtggactgcttcctctcacgtcccacggagaaaaccatcttcatcatcttcatgctggtggtgtccttggtgtctctcgctctgaatatcattgagctcttctatgtcttcttcaagggcgttaaggatcgcgtgaagggaagaagcgatccttaccacgccaccaccggcccactgagcccatccaaagactgcggatctccaaaatatgcttacttcaatggctgctcctcaccaacggccccactctcacctatgtctcctcctgggtacaagctggtcactggtgacagaaacaattcctcctgccgcaattacaacaagcaagccagcgagcaaaactgggcgaattacagcgcagagcaaaatcgaatggggcaggccggaagcaccatctccaactcccacgcccagccgtttgatttccctgacgacagccaaaatgccaaaaaagttgctgctggacacgaactccagcccttagctatcgtggatcagcgaccttccagcagagccagcagccgcgccagcagcagacctcggcctgatgacctggagatttaaacaggcttgaacatcaagctgccaatcgattgtggaggagaaaaaaaagggtgcttgcagaacgtgcacctggggtgttcatttcgttcccgtggaggtggtactcaacaacctcagtaatgaggcgtagaaaacaaagacattacaatatctaggttccttggggggtgttttgggatagctaggcggcaaaagtagggaaaggggaggtatgtaacggtatttaatgtagaagattcaaagagcttaaattctagtaagagtctcattggatgaaacatagatagggctttctctctctgccccccaactgaaccttaagaatggttctgtatacatgagtgagtgggtgatatatattttttttaatttttgttttactgagattctgccatagagctttgagcaggaatccaagtcctcaacatggcatttcctttatgaaaagacaggttgtcctacatccccgctaaaaaacattccagtgtttaaaaacttggcagtttgcaggcgagcttccctggcctgaccctctaggtgtggatggaccttatgctactatacacgattttcattcttggtaggtatcaattcgaagttcagacaaggttcaaagaaaaagattgcccatgtatttgcatctcagtgggttctttttcaaatctgtcccacctttgtgtcttccatatattatcctcagctggtcctcaccctcaccaaatgatttctatcgacatttttaaaacagtgagaaagtcttttttttttttttttgagttagcatcagggaggcaagccatgctcaatatttaacaatcgcttctgtctatgtgtgggtgtgcaagtgtgtaagcgtgtgttttgtcattattggtacaagcagaggcagtataaactcacagatttgaatcgaattcacacagtgttcaaatttgaaccttcctcatggatctttgtggtgtgggccaacgtggtgtttacattatagaattcctgccgtgcaaaagtgtaaagcacacactttttccctaaaatattttttccacgtatcctattatggatactggttttgttaattatgatttttttttcttttttagaatgtagcagtaatagccattactgaaatgaatgatttcctttttctgaaatataatcattgatgcttgaatgatagaattttagtactgtaaacaggctttagtcattaatgtgagagacttagaagagggttgcttagagtggactatcaagtgagcctaaaggaactttgtagtaactggtaatctggtaatttttgtcctacttaactacacattaactcagaacttgtattctgagtttaacagtcttttagattgacgagcaacttggatgtttgcactaagattttctttgagatactagagggggtgaaggagttttcagcagtgcacatgtaactaatttatttgaactgtaagctaaagacacctaccagtttcttcaagtgacttaaaaaaactcatcacagatgattgaaatgtcgagttatcatgtttcctcttgcgcgccagctacacaaggagtttttggacaatgagaaactaatttgtttgacattccatgttaaactactgtcatgttcagcttcattgcatgtaatgtagacctagcccatccaatcaatgtgctcgggaaagtgttctttattcaataaaattttaatttagtataataaaaaaaaaaaaaaaaaaa

SEQ ID NO: 1297 - DNA, 1796 bp, Mus musculus
  misc_feature (166)..(166): "n" = a, t, g, or c.
ggtagagggacttccagagctcggtgcgagaggagagccgggaccgcgctcagccgccaggagagcccagcacgcacgtctaccaggagggcgcgggagcagcgctgagcgcacgatgcgcgcgacccagaccgccgggccagtctacactgccgcgtgggtcacntggcccgggcgggtccgccgctgtgcggccggggggccgggggtgcgcggggcggggggctgctagcgcgcgcccgccatgctcgctccctgcgcgctgcgctggcctctgggcgcgggagccgcccccggcccccccgcgctctgcccgccgcggggcgcgcgccctctatatagcgcgcccctgcccggtccgcgccaagccgcctgccacggatgggcaccgcacgtctcgcagaagccccgcagacagacgcccgccgctgccagcgccgccccgacggccgccccgcgacgcagccgctgccaccgggcccccaaggccaccatgaagaaggaggtgtgttcagttgccttcttcaaggccgtgttcgcagagttcctggccaccctcatcttcgtcttctttggcctgggctcggcactcaagtggccctcggcgctgcccaccattctgcagatctccatagcctttggcctggccataggtaccttggcccaagccctgggacctgtgagtggtggccacatcaatccggccattactctggccctcttaataggcaaccagatctctctgctccgagccatcttctacgtggcagcccagctggtgggtgccattgctggagcaggcatcctgtactggttggcgccaggcaatgcccggggtaacctggccgtcaatgcgctcagcaacaacacaacaccaggcaaggccgtggtggtggagttaatcttgactttccagctggccctctgcatcttctcctccacggactcccgccgcaccagcccggtgggctccccagccttatccattggcttgtcggtcacactgggccatcttgtggggatctacttcaccggctgttccatgaacccagcccgatctttcggccctgcggtggtcatgaatcggttcagcccctctcactgggtcttctgggtaggaccgatcgtgggggccgtcctggctgcaatcctctacttctacttgcttttcccctcctcgctgagcctccacgaccgtgtggctgtggtcaaaggcacatatgagccagaggaggactgggaagatcatagagaggagcggaagaagaccatcgagctgacggcacactgaccggcaccgggcaggggccagtccctcagcccctggaccactggagaaaaggaagacgaagagtttggagcacctctccctagcatcctctcagctggagaggcagcattggatccccatgccgcacacggggatgggatgggagcagaagccatgatgggacacttgggtgtgggccagggacagggcctctttggaattaggcagaacgactgccacagctcagacctcagagattgtgaaggcagtgcaagctcacagcagttcaggaccatcccagaaaggggtgatagccctgtttatctctccaacccagtatctcatgtgccaaagccttcccccaggtagacagaggggacattgcctgagagctcttcaggagagagatagatggttcgtcgagtgccatcttatttattttctggttaagatggggcggaggatgggggggacgctgctggtattcgggttgggcgtttcccaataaaccaccaattttcaaaaa

SEQ ID NO: 1298 - DNA, 1100 bp, Mus musculus
cttgccgattgaaggtccccgtttctccaatttctctccatcttctgggaggtagcaggaaatcagaatcatggttggtttcaaggccacagatgtgcccccaacagccactgtgaagttcctgggggctgggacagctgcctgcattgcagatctcatcactttccctctggataccgccaaggtccggctgcagatccaaggggagagtcaagggctagtgcgcaccgcagccagcgcccagtaccgtggcgttctgggtaccatcctaaccatggtgcgcactgagggtccacgcagcctctacaatgggctggtcgccggcctgcagcgccagatgagctttgcctccgtccgcattggcctctacgactctgtcaaacagttctacaccaagggctcagagcatgcaggcatcgggagccgcctcctggcaggtagcaccacaggtgccctggccgtggctgtagcccagcctacagatgtggtaaaggtccgcttccaggctcaggcccgggctggtggtggtcggagataccagagcactgtcgaagcctacaagaccattgcacgagaggaagggatccggggcctctggaaagggacttctcccaatgttgcccgtaatgccattgtcaactgtgctgagctggtgacctatgacctcatcaaagatactctcctgaaagccaacctcatgacagatgacctcccttgccacttcacttctgccttcggggccggcttctgcaccaccgtcatcgcctcccctgttgatgtggtcaagacgagatacatgaactctgccttgggccagtaccacagcgcaggtcactgtgcccttaccatgctccggaaggagggaccccgcgccttctacaaggggttcatgccttcctttctccgcttgggatcctggaacgtagtgatgtttgtcacctatgagcagctcaaaagagccctaatggctgcctaccaatctcgggaggcacctttctgagcctctccatgctgacctggaccctgcttcccagccctgccctgtctttttcttcatcctctgcccagtcccattctcttcccatttcctgcaccccgat

SEQ ID NO: 1299 - DNA, 2436 bp, Mus musculus
ctcacactggagcagcttcctaaacaggtgccaccatgccagtgaagaagtacctcctgaagtgcctgcaccggctgcagaagggcccaggctacacctacaaggagctgctagtgtggtactgcaataacaccaacacccacggccccaaacgcatcatctgtgaggggcccaagaagaaggccatgtggttcctgcttacgctgctcttcgcctgcctggtgtgctggcagtggggagtcttcatccagacctacctgagctgggaggtcagcgtctcgctctccatgggcttcaagacgatgaacttcccggcggtcaccgtctgcaattccagccccttccagtactccaaggtcaagcacttgctcaaggacttggatgagctaatggaggcagtcctggaaaagattctggctccagaggccagccacagcaacaccaccaggaccctgaactttaccatctggaaccacacacccctggtccttattgatgagcggaaccctgaccacccggtggttctcaatttgtttggggacagccacaacagcagcaacccggctccaggaagcacctgcaatgcccagggatgcaaagtggccatgaggctgtgcagtgccaatggaactgtgtgtaccttgcggaacttcaccagtgccacccaggccgtaactgagtggtacatcctgcaggccaccaacatcttctcacaagtgcttcctcaggacctggtggggatgggctatgcccctgatcgcataatcctagcttgcctgtttggaacagagccctgcagtcatcggaacttcacgcctatcttctaccctgattatggcaactgctacatcttcaactggggcatgacagaggagacacttccttctgccaaccctgggactgaatttggtctcaagttgatcctggacatcggtcaggaggactatgtccccttccttgcgtccacagcaggggctaggctgatgcttcatgagcagaggacgtaccccttcattagagaggagggcatctatgccatggcaggaactgagacgtctattggggtgctggtggacaagctgcaacgcaagggggagccctacagtccctgcaccatgaacggctccgatgttgccataaagaacctctacagtgtctacaacaccacctattccatccaggcctgtcttcattcctgtttccaagaccacatgatccgtaactgcagttgtggccactacttatacccactgcctgaaggagagaaatactgcaacaacagggacttcccagactgggcctattgctatctaaacctgcagatgagtgtgacccagagagagacctgcctcagcatgtgcaaggagtcctgcaatgacacccagtataagatgaccatctccatggctgactggccatctgaggcctctgaggattggatcttacatgtcctgtctcaggagcgggaccagagctcgaatatcaccctgagcaggaagggtattgtcaagctcaatatctacttccaagagttcaactaccgtaccattgaggaatctccagccaacaatattgtgtggctgctctctaacctggggggccagtttggcttctggatggggggctcggtgctgtgcctcattgagtttggggagatcattatcgacttcatttggatcaccatcatcaagctggtggcctcctgcaaaggcctgcgcaggaggcggccacaggcaccctacactggcccaccgcccactgtggctgagctggtagaggcccacaccaactttggcttccagcctgacacaaccagctgcaggccccacggcgaggtctaccctgaccaacagactctgcccatcccggggactccaccccccaactatgactccctgaggctgcagccgctggacaccatggagtcggacagtgaggtggaggccatctagatccccacccccacccagcaactagtgaactcaaaactgaagagttacaaccattgtcagtgcctcgtttcattaggccttgtacaaagagccgggggcaccgttgcccaagccagagcccatgtctggtcagccccaggctgcagggttcttagggtcagatgctggttccagaatacggaacttgtatccttttctggctcttgcgtaccctacccagtatttgctctctgttgatctagcacacaggctccagagatggctagagtccctctcctggttgataggccactttcctgtctgttaccacctcagtctcccagaatccttgccctagttggcattggttgacctctgttaacagacttgggggggtgcagatcatagggagatcaggtaagaagtcttgaaaggggaacacgtgctttgttagaaaataaagagagaaaacactggaaaaaaaaaaaaaaaaaaaaaaaaaaaa

SEQ ID NO: 1300 - DNA, 1211 bp, Mus musculus
ccggcgtgggactgggagtccgtccgggcagcgagcgcctcgccgtcgggtcccacggagaagccggtggctgaagccgtactattttatagcagtcatggagatcagtgacgatgttacaaacccagaacaactttggaaaatgaagccaaagggaaacctggaagatgacagttactcgactaaggactcgggagagacgagcatgctgaaaagaccggggctctcgcacttgcagcacgcggtccacgtcgatgcctttgactgcccctccgagcttcagcacacgcaggaattctttccaaactggcgcttgccagtgaaagtcgctgccatcatatcatccctgactttcctgtacacacttctgagggaaatcatctacccgttagtaacttcccgtgaacaatatttttataaaattccaatcctggttattaacaaagtcttgccaatggtcgccattaccctcttggcactggtctatttgccaggagagttagcggcagttgtacagcttcgcaatggaaccaagtacaagaagttcccaccctggttagatagatggatgctggccaagaagcagtttggtctcctcagcttcttttttgctgtgctgcacgctgtttacagtctctcatacccaatgaggagatcctacagatacaagctactcaactgggcttacaaacaggttcaacaaaacaaagaggatgcctgggtagagcatgatgtctggagaatggagatttatgtgtccctggggattgtggggctggccatcttggctctcttggctgtgacatctattccatctgtgagcgactctttaacctggagagaatttcactatattcagagcaaactaggaattgtctctcttcttctgggcacagtacacgctttggtttttgcctggaataaatgggtagatgtcagtcaatttgtatggtacatgcctccgacttttatgatagctgttttccttccaactcttgtcctgatatgtaaaatcgccctgtgcctgccctgtctgaggaagaagatactgaagattagatgtggttgggaagatgtcagcaaaattaacaggactgagatggcctccaggttgtagaactactgtttgcacatatttgcttgttattgatgtcctatcataagcatttcaaatttgtgtttgttaataaaatgaatactttgggatcgtt

SEQ ID NO: 1301 - DNA, 977 bp, Mus musculus
  misc_feature (76)..(76): "n" = a, t, g, or c.
  misc_feature (237)..(237): "n" = a, t, g, or c.
tgtacctaggatctgctcacttcggttgggccatactgatatgcagttctcattaagctcttacagcagttgcagncaagattgggccagcgatggactcgaagagtcaatatcaccacatcatcaacactccatctccagtttaaacggaagattagctctgccagcatagagatctctggtgacaatgtcaactatagtgacttgacaatgaaagccagcgacaagtttaagttngtcttccgagagaagatcagcagaatcattgattatttcacaattcaaacccccagcaatgtggatcgatactccaaactactatttcctttgatttttatgttggccaatgtattgtactgggcatactacatgaatttttgagacgccattgaactcttgcatcacataatgaggttaagggtattctagaacatgtgtgtgcacttcagcttagaaagctacaaatgggctaatgtaacaattattctaagttgtgtagaagccctagtgtgaccagattctataatagagtcattataaggcaacccttttcttcttcaattttggacagaacaccccctccacacacatacacagaacccaagactgcgaacctactcagggctatttgctctctggatccctggtctgcattcactccataaaaatgtgggaagatgattacatatattaaggggtttattttctaaagaattcatagtgccactgattacatctctgtggcccttataatatgctctcttgcctatttaaacaccagtgttttctaatttttgtttttccttgaaatatgaaatgtgggtttgcgtcaattcattggtggttaccttgcctcatcaacctaataccagatgggttcttagtgttatttaataccacagaagaattgtccccaaattctaatacatcctattattcacaaatcagatgtaaatgaataaaattagtggatcaat

SEQ ID NO: 1302 - DNA, 344 bp, Mus musculus
tttttttttttctttttaactactgtttaatccctttaaagacacagaaattataagaaaaaaaagccacatgtaagttaaaaacacctttaaaagccagcaataagccactgtgtagctctgaagacacagaatgggaaaaatggttatgaatcatgtcacagcttgtctgatacagtgtggtttcaactcaccatacaatgacactgatttgaggatcagttgaaaaagaacacttctttaaaaaaaaaaaaatcatcaatttaaaaaaaaaaaaaaaatgcacaacccaccacacgatatcctccgctggggaaggcaagcggaaacactgcaggcgctgg

SEQ ID NO: 1303 - DNA, 393 bp, Mus musculus
ggggtttctaattacctgtttaactttcaaaataaaatacaattactaattcaccacaggcttgtaaaaaatctctagcatacattcacatacaccagatatctgctccttttcagacattgagaacattccatctctggatgtttactctttaggtcacgttgttactgcctccatttagcagttagaatcatggctgaccataacaaggaaatctttttgttcacaaatgtacagcttttaccctcccagtccacaatggcaccatcagtccatttactttcttgtccctccacttgtcacggattgtaacatcagcattttactctgtagctaaaattaggtattctctttaaagaagaaagccatatgtggtccatttgcattactacc

SEQ ID NO: 1304 - DNA, 2860 bp, Mus musculus
accagcgcctccttggtccaatccagtttcaggcgagaacaccgctcctgggcgaagaagcttgagagaggccagaacgacttctcggcaaactgctgcggaaaccctcctgcgtccaggcttagagtccttgtttggcgccggctgcgtcctcctgaggctgcactgtgcgatggtggttcctgagttccggagcccacagtgcagggcactatgcacgaagctgctgctgaccctctgggtcttcagttttgttggtgaagcctgtaaaaaggtgacatttcatgtaccttcaacactagaggtagacaagatcatcggaagagttagtttgaaagagtgtctcagctcggcagatggcatcatgccaagtgatcctgatttcagagttctagatgatgggtcagtttatccgaccagagctgttgtattgtctgatgagaaaagatcttttaccattcagctttctgattcaaagatgcagacacagaaagagatccctgtaatcctggagcacaagaagaaggtactgaagaaaagacacactaaggaaactgtcctcagaagatctaagagaagatgggcgccaataccgtgttcaatgcaagaaaattccttgggtcccttcccattgtttcttcaacaggttcagtctgatgcagctcagaactacacagtcttctattcaataagtgggcgtggagctgatcaagaaccacttaactggtttttcatcgagagagacactgggaatctatattgtactcggcctgtggatcgtgaggaatatgatgtttttgatttgattgcctatgcatccactgcagatggctattcagcagatttacctctcccactgcccatcaaaatagaggatgaaaatgacaattaccctctttttacagaagcaatttatgcttttgaagttccagaaggcagtagacttggtactgtagtgggaacagtttgtgccacggataaagatgagcctgacactatgcacacacgcctcaagtacagcatcttggagcagaccccaccatcacctgggcttttttctgtgcaccctgacacaggtgtcatcaccaccgtctctcactacatggacagagaggtcgtggacaagtacaaactgataatgaaagttcaggacatgaatggccaattttttggactaatcagtacatcaacttgtatcataactgtgcaagattccaatgacaatgcacccacattcagacaaaatacttatgaaactgctgtggaggaaaatacatataatgttgaaatcttgcgcatacctgtagatgataaggacatgattaacactgccaactggaaggcaaatttcaccatcttaaaaggaaatgaaaatggatggttcaaaatcacaacagacccagtgacaaatgaaggtgttctgtgtgttgtgaagccactggattatgaagaaaatcgtcaagtgaccctagagactggtgtgaacaacgaagctccattcattaaagatgttgcaaaccgaattcccaccatgaaccgggctatggttacagtacatgtgaaggatcagaatgaggggccagaatgcaagcccccagagcaatatgtgcggatcaaagagaactcagcagttgggtctaagatcaatggctacaaggcctacgaccctgaaaccaagaatagcaatggcttaaggtacaaaaaattgcaggatcctaaagactgggtcagcattgaagaagtttcggggttgcttaccatatcaaaaaccctagacagagaaataattgctccaagaaatgacatgtacaatattacagtcatggcaattgaccaagagggtaaatcatgcacaggaacacttgcagtgaacatcgaggatgtgaatgacaacgcaccagagataattcaagattatattgttatctgtaagccaaagatggggtacacggacatttcagctgttgatcctgatgaacctatccatggccctccctttcagttcaacttggcaaacacttctccagaagtcaacagaatctggaccatcaaccaagttaatgatacagctgcccgcctgtcttatcagaaaactgcggatgttcaaatatacaacgttcctgttactgtaaaagacagagcaggccaatctgcaaccaaaatcttgagagttaacctgtgtgattgtactcatcccagccaatgtccgctcagatcaaggagtgcaggaattaccctgggaaagtgggcctaccttgccatcttgctgggcattgctctgctattttcggtactgctaactttggtatgtggagttgttactgcccgaaaaggaaaacatttccctgaagatttagcgcacgaaaatttaattatatcaaataccgaagcacctggggatgacagagtgtgttctgcatggattcaccacccacactgccaacaactccagccaaggcttctgtggtacaatgggtcaggaatgaggaatggtgggcaggagacgattgagatgatgaaaggacaccagaccttggactcctgccgtgtggccgggcatcaccataccctggattccggcaggggaggacacatggatactgataactgcagatacacatactcagagtggcacagtttcactcaaccccgacttggtgaaaaattgcatgtgtgtaatcagaatgaaaaccacatcccatcccaagactatgtcctcacctataactacgaaggcagagggtctccggccggctctgtaggttgctgcagtgaaaagcaggaagaagagggacttgacttcttaaacaacttggaacccaaatttcttacattggcaaaaacctgcactaagcgctaa

SEQ ID NO: 1305 - DNA, 419 bp, Mus musculus
gtgttgaagaggagccccggggaggccaagccgcgttcccgagatgtgacccgaaatgacagaccatgcacactcccgggaccccggcgccgggccacccggacccgccgccactgttgctgctcacgctgcttctgctgctggccgcttcgggacgcgcagttccttgtgtcttctgtggtttgccctaaacctacaaatatcaccttcttatccatcaacatgaagaatgtgctggattggaatccaccagagagtatacacggagttgaagtcacatacactgtgcaatatttcatatatgggcagaagaaatggctgaatgcctctaaatgcgggagtatccccaggacctactgtgacctttgtgttgagacctcagactatgaacacccagttctatggcaaagtgaaggcca

SEQ ID NO: 1306 - DNA, 388 bp, Mus musculus
tttttttttttttttttggttattgaatatgtcttttttactgaaaaaatcattcataaattaacatacaaaaatgtacaaacacatgagtgaacaatgtaatgacaaggactatttctgtgaaaagtgtttttaaaacatctttaggtttcagtgcaaaaatgtacccctggcaccttttaaaacaaagagcaagctcacaacagagacagtaatgctgggctaagctggctgcgtcagtgcctcaatctgttggtggtgggtacgtcagtgtgtacgccgcggctctgtgctgtcctctgaggaagggaagcgatgacagagtcccctgacagagtcccccattttaacaaaattaaggttttgcaaataccccctcccccgaaga

SEQ ID NO: 1307 - DNA, 1589 bp, Mus musculus
gcctcatgtggcccggcccgcggcggccgcggctgaaaccgcgaggcggcggcgcgcgaacccggaaggcggcggccgaggcccaggcggcggaccggagcggcgggacggggcccgggttggccctcgagcggccgccggctcagcatgcgcgcccgccgggggctgctgcggctgccgcgccgctcgctgctcgccgcgctcttcttcttctcgctgtcgtcctcgctgctctacttcgtctatgtggcgcccggcatagtgaacacctacctcttcatggtgcaggctcagggcatcctactgcgggacaatgtgaggaccatcggtgcccaggtgtacgagcaggtggtccgcagcgcctatgccaagaggaacagcagcctgaatgactcagattatcctctggacttgaaccacagtgaagcctttcccccaaccacgacctttcttcctgaagatttcacctactttgccaaccacccttgcccagagaggctcccttccatgaagggcccgatagatataaacatgagtgagatcgcaatggacgatattcatgagctgttctccagagacccggccattaagctcggagggcactggaagcctgcagactgtgtgcctcggtggaaggtggctatcctcatccccttccggaaccgccatgagcacctcccggtcctcctgagacacctgctccccatgcttcagcgccaggccctgcagttcgccttctatgtgatcgagcaagttggcacccagccctttaaccgagccatgcttttcaatgttggttttcaagaagccatgaaggacttggattgggattgtctgatcttccatgacgtcgatcacatacctgagagtgaccgaaactactatggctgcgggcagatgcccaggcactttgcaaccaagctggacaagtacatgtacctgctgccctacactgagttttttggtggcgtgagcggcctgactgtagaacagtttcggaaaatcaatggctttcctaatgccttctggggctggggcggagaagatgacgacttgtggaacagggtacaaaatgcaggctattctgtgagccggccagaaggggacacaggaaaatacaagtccattcctcaccaccatcgaggagaggtccagtttcttggcaggtacgctctgctgaggaagtcaaaggagcggcaaggactggatggcctcaacaacctgaactactctgcgaatgtcacgtacgacgccttgtataaaaacataactgtcaacttgacacccgagctggctcaggtgactgagtactgagatgcgaagagaagccgcactcacctacccaccgctcccttggacgggctgcgacccgccatcctgggggtcaacacaggaggacagaagagagtggagcacaggaccataggggttccagaaaactgtcacagagcacacgcacaaaggccttcgctgtagggcccaacagggacaggagacttgaggacacctgtcatcagcactggtgtctattccacaagacagatgtctgccctgccactcccttccgtccgtccctgtccgtccccccc

SEQ ID NO: 1308 - DNA, 950 bp, Mus musculus
aacaagaaaacccaagcaactgctgccatggcggggaagccagtccttcattactttgatggcaggggaagaatggagcctatccggtggctcttggctgcagctggtgtggagtttgaagaaaaatttctgaaaactcgggatgacctggcaaggttacgaagtgatgggagtctgatgttccagcaagtgcccatggtagagatcgacgggatgaaactggtgcagaccaaagccattctcaactacattgcctccaaatacaacctctatgggaaggacatgaaggagagagccatcattgacatgtacacagaaggagtggcggatctggagataatgattctctattacccccacatgccccctgaggagaaagaggcaagccttgccaagatcaaggaacaaaccaggaaccgttacttccctgcctttgaaaaggtgttgaagagccatggacaagattatctcgttggcaacaggctgaggagcgctgatattgccctggttgaactcctctaccatgtggaagagctggacccgggcgttgtggacaacttccctctcctgaaagcgctgagaagcagagtcagcaacctccccacagtgaagaagttccttcaacctggcagccagaggaagccttttgatgacgcaaaatgtgttgagtcagcaaagaagattttcagttaattcaggcaactataagtacatagcccccacaaagccaaccttctaaaattttgcatcacattgaagtgttttgactaagtgttgaccctacttagaaagctaacaagttttctaaggcgtctgtgtcaattcaggtagacatgactgacgaggaacggccggatgctctctagttgtagttaaaattgaaatcatgatcacttccycggatattttcttactgttcaataaaacaaaacaagcttcttagactctgg

SEQ ID NO: 1309 - DNA, 5893 bp, Mus musculus; identical to SEQ ID NO: 1207

SEQ ID NO: 1310 - DNA, 897 bp, Mus musculus
atgcgcgacaggacccacgagttgaggcagggggataacatctcagacgatgaagatgaggttcgagtcgcgctggtggtgcactcaggtgctgcccggttgggcagcccggacgacgagttcttccagaaggtgcagacaattcggcagactatggccaaactggagagtaaagtccgggagttggagaaacagcaggtcaccatcctggccacgcctcttcccgaggagagcatgaagcagggcctgcagaacctgcgagaggagatcaaacagctggggagagaggtccgggcgcagctaaaagccatagagccccagaaggaggaagctgatgagaattacaactcagtcaacacaaggatgaagaaaacccagcatggagtcctgtcccagcaatttgtcgagctcatcaacaagtgcaactcaatgcagtccgaataccgagagaagaatgtggagcggatccggaggcagctgaagatcaccaatgctggaatggtgtctgacgaggagctggaacagatgctggacagtgggcagagtgaggtgtttgtgtctaatatcctgaaggacacgcaggtgactcggcaggccctgaatgagatctctgcgcggcacagtgagatccagcagttggagcgcagtatccgagagctccatgagatctttacgtttctagctacggaggtggagatgcagggggagatgatcaaccgcatcgagaagaacatcctgagctcggccgactacgtggaacgtgggcaagagcacgtcaagatagccctagagaatcagaagaaggcgaggaagaaaaaagtcatgattgccatctgtgtctctgtcactgttctcatcttggctgtcatcattggcatcaccataaccgttggataa

SEQ ID NO: 1311 - DNA, 1686 bp, Mus musculus
ggttggcaccagttcgctcacccttcgagaggcagagcgctcttgtccgcaatcttcgctgaccgcgctagctgcggcttctgtgcgccttcattcggaccttagcagccagcgtcctggcgtctgaccccgccatgcctagcctctgggatcgtttctcgtcctcctcttcctcttcgtcctcgtctcgaactccggccgctgatcggccgccgcgctccgcctgggggtctgcagccagagaagagggccttgaccgctgcgcgagcctggagagctcggactgcgagtccctggacagcagcaacagtggcttcgggccggaggaagactcctcatacctggatggggtgtccctgcccgactttgagctgctcagtgaccccgaggatgagcacctgtgtgccaacctgatgcagctgctgcaggagagcctgtcccaggcgcgattgggctcgcggcgccctgcgcgtttgctcatgccgagccagctggtgagccaggtgggcaaggaactcctgcgcctggcatacagtgagccgtgcggcctgcggggggcactgctggacgtgtgtgtggagcaaggcaagagctgccatagcgtggctcagctggccctcgaccccagcctggtgcccacctttcagttgaccctggtgctgcgtctggactctcgcctctggcccaagatccaggggctgttaagttctgccaactcttccttggtccctggttacagccagtccctgacgctaagtaccggcttcagagtcatcaagaagaaactctacagctccgagcagctgctcattgaagagtgttgaactacatcctggggtggggtgcggggagggtttctcactgccccccaaagtgaagacaaggaatttctgtggtggagacccgcaggcaaggactgaaggactgtcccctgtgttagaaaactgacgatagccacctgaggggcgcagggccaggtgggggaaggaagtgttctccaggaagtctctaggttgtatgcaggtggctccctgttggggcacacgcccctcagtactgtagcatgaaacaaaggcttaggagtcacacaggcttctggctggatgtgtatgtagcatgtaccttatttttttttattactgacaagttacaacagcagttgtgggccagagccagaagggcagctggtctgcactggcctctgccccggctgggggttgggggctgggggggaggcagggggaggtggccgacagtttgtgtatcttctggtctgaaaggacctagtgtgttttgtcatttgttttgtatcttggttttggggggtggggatcggcgcttcactactgacctgttcgaggcagctatcttacagactgcatgaatgtaagagtaggaatggggtgggtgttaggatcattcgggatcttcgacacttgaaacaaaattacacctgggagctgcagccagcccatcccggtgcccatgtactggaggattcaactgtgaggagaggggctggggtgggggtggggggctggaaccctcttttcccagaggagtgccacctgggtcttccatctagaacctgtttacatgaagttactcgcggttcatgaatacacttgatgttcaagtattaagacctatgcaatatttttacttttctaataaacatgtttgttg

SEQ ID NO: 1312 - DNA, 2002 bp, Mus musculus
ggcctcggccccaccatgtcgagcctcggcggtggctcccaggacgccggtggcagtagcagcagcagtaacaccaatagcagcagtggcagtggccaaaaggcaggaggaacagacaaaagtaccgcggtggccgccaccacggcgccgacctccgtggcagacgatgccccaccccctgagcgtcggaacaagagcggtatcatcagtgaacccctcaacaagagcctgcggcgctcccgaccactctctcactactcttcctttggtagcagtggtggcggcggaagcatgatgggggtggagtctgctgacaaggcagcggcagccgcagcctccctattggccaatggtcatgacctggctgcggccatggcagtggacaaaagcaaccctacctcaaagcacaaaagtggtgctgtggccagcctgctgagcaaggcagagagggccacagagctggcagctgagggacagctgacgctgcagcagtttgcacagtccacagagatgctaaagcgcgtggtgcaggaacacctgccactgatgagtgaggccggtgccggcctgcctgacatggaggctgtggccggcgccgaagccctcaatggccagtccgacttcccctatctgggcgctttccccatcaatccaggcctcttcatcatgaccccagctggcgtgttcctggctgagagtgcactgcacatggctggcctggccgagtaccccatgcagggagagctggcttccgccatcagctcaggcaagaagaagcggaaacgctgcggcatgtgtgcgccctgccggcggcgcatcaactgtgagcagtgcagcagttgtaggaaccgaaagactggccatcagatttgcaaattcagaaagtgtgaagaactcaaaaagaagccttccgctgctctggagaaggtgatgcttccgtcgggagccgccttccggtggtttcagtgatttcagtgacggccgggaacccaaagctgccctctccgtgcaatgtcactgcccgcgtggtctccggcaagggattcgggcgaagacaaacggatgcacccgtctttagaaccaaaaatattctctcacagatttcattcctgtttttatatatatatattttttgttgtcgttttaacatctccacgtccctagtataaaaagaaaaagaaaagaaaaaaaattttaactgctttttcagaagaacatcaacaacaacaagagaggtaaagacgaatctataaagtaccgagacttcctgggcaaagaatggacaatcagtctccttcctgtgtcaatgtcaatgtcaatgttgtctgtgcgggagatgctgtttttgtgtagagaatgtaaattttctgtaaccttttgcaatctagttactaataagcactactgtaatttagcacagttttaactccactctcattttaaacttcctttgattctttccaaccatgaaatagtgcatagtttgcctggagaatccattcacgtttataaaggaataggtggtggcaccgtgtagaagcccctctgtatccatccatgtgtgcagaggggccagagcccactgggactgggagttcctgacccaggcccgaccatgttgcaccccatcgtcccctgattgggattccccctaccccaacagtgatggattttggagagatgaaaattctattcatttgttgatccactgagatctggagagcccacatctcagtatttctgatcctggctacttcccttagagaaaataagccctcttttctcagccttgctcgcagcagcagaagaaagggcttctctgcgtggtcccctgctggtaggggtgggtgcccagggggccccctgcccgtggccagctccctgctgaggaacatgctgtttgtattgttttaggagaccaggctgttttgtgaataaaactgaatgcatgtttgtgtcatgaaaaaaaaaaaaaaaaaaaaaaaaaaaaaaaaaaaaaaaa

SEQ ID NO: 1313 - DNA, 409 bp, Mus musculus
ttttttttggtgtttttttgctgcagcggcttccacctttggggcatttacttcccagtactacagttgtagcgcacagagaggcatcttacccacctccactggcaagtggacttgcctatttcattagcagtggtctaagagcctacatctttcttgatcctcacaggaaagctgctcaagaggcatgctgctgagtccttagtcatgagtgacatgattggcaatatccacatgtgcttagttgtcagaaaacaggaagtttcaaccggcatggccaggtatcactgtccccaagtttaacccatacagtacttagccctgaagagtgttatcccaaaagctctttgaacatatgctcagtagagttcattgacttgtattacaaacatccttgtatcatgggaga

SEQ ID NO: 1314 - DNA, 385 bp, Mus musculus
cggccgcgtcgcaccggcagagagaggcctcagcgcaggaggatgcgaagggcgtctggaggatgtgggggaagacggagaacggcggcgggagccgggttgcgaagaccgcgctgtccgaggcgcgcacggcgctggcgctcgcactctacctgctcgcgctgcgggcgctcgtgcagctctcgctgcagcggctggtgctgagccggacctcggggctccagggcgagttcgacgcgcgccaagccagggattatctggaacacataacggccattggccccaggacacaggaagcacagaaaatgaaattctgacggtacagtaccttttggagcagatcaagctgttagaagcacaaagcaacagccttcacagcatctcc

SEQ ID NO: 1315 - DNA, 294 bp, Mus musculus
accttcccaatcccccgccttccattattctcactttcaagcttactgctccgttacatcgcagccctctttcaggtctccttccgataatgcctgcagctgaccaagaattcctgaaatggatgcagagaggtagagaccctccctggaggacaggactccagaaccccttactacatgagccacagctcaaatcccacccaccagctaccatttcctggtgggctcttttataatgctgcatattcctgaccatattcctgtgcttcactgcttaattaaaactagttttcg

SEQ ID NO: 1316 - DNA, 1936 bp, Mus musculus
agtcgcgagcgagcatccctagcgcttgcttgtaggagctgcgtctgcagtagcctggccgctgacgctgcgtgccggctggcagggcagcctgcgacctcgctggccccgcgcccgctgctagccgccggctccccacctggttcgcacctagtcccagcccgggtcgcctgccgagtgcgcgccatggggccgccgcccgggatcggggtctactgccgcggcggctgcggagctgcccggctactggcttggtgcttccttctggctctgagtccgcacgcgcccggttcccggggagccgaagccgtgtggaccgcgtacctcaacgtgtcctggcgggttccgcacaccggagtgaaccgcacggtgtgggagctgagcgaggagggcgtgtacggccaggactcgccgctggagcccgtctccggggtcctggtaccgcccgacgggcccggggcgctcaacgcctgtaacccgcacaccaatttcacggtgcccacggtttgggggagcacggtgcaagtatcttggttggccctcatccaacgcggtggaggctgcaccttcgcggacaaggtccatctggcttcagagagaggggcttctggagcggtcatctttaacttccctgggacccgcaatgaggtcatccccatgtctcacccgggtgctggggacattgttgcaatcatgattggcaatctgaaaggaacaaaaattctgcagtctattcaaagaggcatccaagtcacaatggtcatcgaagtagggaaaaaacatggcccttgggtgaatcattattcaattttcttcgtttctgtgtcctttttcataattacggcagcaaccgtgggctatttcatcttttattctgctcgaagattacgaaatgcaagagctcaaagcaggaagcagaggcagttaaaggcagatgctaaaaaagctattggaaagcttcagctgcgcaccttgaaacaaggagacaaggaaattggccctgatggagatagctgtgctgtgtgcattgagctctataagccaaatgatttggtgcgcatcctaacctgcaatcatattttccataagacatgtgtggacccgtggcttttagaacacaggacttgccccatgtgcaagtgtgacattctcaaagctctgggaattgaggtggatgttgaagatggatcagtgtctttacaagttcctgtttctaatgaagcatctaatactgcctctccccatgaagaggacagtcgcagtgagactgcatcatctggatatgcttcagtacaaggagcagatgagccacctctggaggaacatgcgcagtcagcaaatgaaaatctacagctggtaaaccatgaagcaaattctgtggccgtggatgttgttccccatgttgacaacccaacctttgaagaagatgaaactcctgatcaagaggcagctgttcgggagattaaatcttaaaaatctgtgtcaatagaaaacttgaaccgttagttaacaacaggactgccaatcagggcctagtttactatgaatgaactgggtaaacgtaaaacaagaatgatactgaaagtgctgaggtaacttatattatactatagttaaatggcttaacatatttaccccagtaccgttttccacaaactcaccataacgtttttcataggcaagtttcctcttggtgatagtgatagcaacatttttaacattcagaaccgtctatgagtagtcaggtttttcatttacaacaactttgttataaaaaaatatgttgctttaaaagtgtggagtagctgtaatcactgtgttttatgatagtatcataattaaactaatactactactttagcttgggctgctgtgtgtcggggtttgtctgcctaggtgcttatattgttactggaatttgtttaaaaaaaaaaaa

SEQ ID NO: 1317 - DNA, 534 bp, Mus musculus
  misc_feature (419)..(419): "n" = a, t, g, or c.
tttttttttttttttttcaaattattacaagacatttattacaaatgtcacagacatattcataaagaaaaattagttttaaaaaaagagaacaagagagcacgtgagaaaaggagaaaagccagagtgtcgattttacacctgaaacacaggcagggaggggccatctatgaagaagtagggcaaactacattcttaaaacagttttagtgcattgcattcttagaaaagggacacaccgtcactcccaagaaaggctcctgcaacatcaacagtctgtgtgactccccagtgtgacccctgcctgcttccaaacccaactgagaacaatgacatctcttatgtgtcacaggtggcagctggctgcctgtcacccgctaatggtgaacttggtgagaacagagcagtctgcatgctanaagcagactgcagcagctacaaggctactccctgctgtcatagacaggcttgttttttattttttgtttttttccttttttgtacctgatttagacttgtgacaaagtcaaactt

SEQ ID NO: 1318 - DNA, 245 bp, Mus musculus
tttttttttttttttttaaacacaggaagagttctttattgtacactggagaaataaccctgtgtgctggttcaaggtgcaacatacagaatagagaattaagaaaagaaggaactgggaggggtggggacctcttgaggtccaaagttgcaaacaaataatttaaaagaacaaaaaaaaaaaggtaaaagattcctcacgcaagaggcatttttttgcaaataccatgcaaaacaggcagctgg

SEQ ID NO: 1319 - DNA, 3565 bp, Mus musculus
gggccgtatattgcgcgcagcgggactgctcgcccagcgcagggcccggatcagcagctgcggccggagctgcgcccgcggccccagccgaggccgggactcagagccttcggcgaaccaccgcgttgatttcatctcacaatggaatttcagaagtcacctgacggagggtggggctgggtgattgtggttgtctccttcttcacccagttcctctcttacggatccccgttagctgttggggtcttgtatgtagaatggctggatgccttcggtgaaggaaaaggaaaaacagcttgggtgggatccctggcgagcggagtcggcttgcttgcaagtcctgtgtgcagtctcttcgtctcatcttttggagcaagacccgtcacaatcttcagtggcttcctggtggctggcggtctaatgctgagcagtcttgcccccaatatctactttctgtttttttcctatggcatcgttgtaggtctcggatgtggcttattatacacagcgacggtgaccatcacatgccagtattttgacagccgcagaggcctcgccctcggcctgatttcaacaggttcgagtgtgggtctattcatctacgcagctctgcagaggatgctgattgaattctatggcctagatggctgcctgctcatcgtgggcgctttagctttaaacatcctagcctgtggcagcctgatgaggcccttgcaaacctccgactgtccttttcctgaaaagacagctccagagaatgttccagacagatactccatgtataacgagaaagagaagaacccagaggagactatgaacttccaagacaagggctacagtagcgaagataaatgcttgcccaatggagactggggacgggagacttcccttcctaaaagcctcgccatcgctgcacacaccaaggagcccgagacgtacaaaaagaaggtcgtagaacagactaatttttgcaagcagcttgccaagaggaaatggcagctatataggaactactgtggagagaccgcgtctctttttaaaaacaaagtcttctccgcgctattcatcgccatcttgctttttgacatcggaggatttccaccatcgctgctcatggaggatgtcgcgagaagttaccacgtgagggaagaagatcttaccatgcctctcatctccattttcggcatcatgacagccgtgggcaagcttcttttgggcatcctggctgacttcaagtggatcaacaccctgtatctctacgtagctaccctgatcatcactggcctggccttgtgcgcaatcccctttgccaagagttacgtcacgctggctatcctttctggcatcttgggttttcttactggtaactggtctatcttcccgtatgtgaccacgaagactgtggggattgacaaattagcccacgcctatggaatactcatgttttttgctggacttgggaacagcctcgggccacccatagttggttggttctatgattggacccagacctatgacatcgccttttatttcagtggcttctgtgtcctgctcgggggattcatcctgctgctcgccatcttgccctgttgggatatgtgcaacaaaaaactacctaagccagcagtgccaaccacctttttctacaaagttgcctctaatgtttagagggatattaaaaggccttattttctctatttttctactttataccatacagcaatatgtgtatgtatgtatgtatgtatgtatgaatgaatgaatattcgtatataacaaattgttaggcaggttctagagtcacaatcttatagcaaaacttctctggctgactctgaaggacaacgcacgctctgtctttgtgtgccttgtataaccttgattccttgtcttcccctcccccacccctcgagaagtgggactgttctgttctgttctgtttcatggttgttcgttgttcatgagttcagaattagcctcgcacagttttctctggatgaaatttaaagtctctgctttccccgtgagttctctaaggtgctcagtgggtcctgtcttaaactgtgcgctcctcacaattggatttgcgtgaaggagtaatggctgtctcctcgatgtcagacctgcaaatccagagaagacaatgagccatttcatttccggaaatgaaagcggttgcaacatcgctgagctgtcgaagaccttagacaagatagttttaaatcacagatgtctgacgtccgttttgttttactgtgctcgatgaagtactgtgaggcagtttggtgtccactgccttcgaactcactcgattcctccagcagtccgcctgcatggccggctcctaggaccttgctcgctggtgttgatcggcaaccactctgctgatgtctccaaataacctgttggtttgccggtttccgccttggaaatagacctttgaaccattccgaaatctggccaatgggaagcgcccatttgctttgagcacctcgagaacgggttgcaaggccttgcttgcatgtcttccaaatgaagtccgtggtggtttctcttgggcttttccactattgcgtttcgatttgtggacagtgctaaaaaaaaaaaaaatgatgctttcggtccataagatgtgggaaaggacaaggtaaagagaactcgctactctcacccaaccgtatttaatcccaagaacaatgtttgagggtgaaaaataatgtttaataaatgggcttttttttcctctatagaaatgggtttcaagtttggtatggctggaaatgccctgtggaaacttaaatgcgtgctactatgctgctttcctttgcattattttttgagacagggtttcttctgcgtagccttagctgatctgaacttgcagtatagaccagcctggccttgaactcagatccacctgcggctgcatcccaagtactgggattaagtaggagtacctttcctggctagtactgtttttcttgaataaaaggaaacaaacaaacaaacaaacaaacaagataaaccatgaagtcaggtattataaaacaaacagccaagggttctttaagtaagggatccctttctgttgtgccaaaattttccttttttttttttttttaatatgtgaaatgattttgcaggactacattgccttcctttggggacacctgaagcactttattacacatcccggatagcacctcccagaggtacaactgtgtcctgtgtcatcaagtagaaagattccatcgcatagtcagtcctgtggcaatgcaataatggggctccaagcacatgagacttgtgttctacactcagacttctggaaagttctttgtacctcattcttcagtctatcaaagttagtaactaaagcctaactccagctccaggggatccggcaccctcttctgtcccccacagccacctgtgtattggtggaatatatatatatataatatatatatatatatatacccccacacataaataaaaataaaaaaagatgtctttaaaatttagagctatgattttttttaagccaaataaataaataaaaatt

SEQ ID NO: 1320 - DNA, 1494 bp, Mus musculus
gggtgagctgtgtggctttgaccatgaagccgcagccaccgggctaggcccggggctgctccaggcctgggcggcccgcagagggctgggccggtcaccggctcgggttcccgggacggcaggtggccgctcaccatgcccggcaagcaccagcaattccaggaccctgaggtcggctgctgcgggaaatacttcctgtttggcttcaacattgtcttctgggtgctgggagccctgttcctggccattggcctctgggcctggggtgagaagggcgttctctccaacatctcggcgctgacagatctgggcggtcttgaccccgtgtggctgtttgtggtggtggggggagtcatgtcagtgttgggcttcgccggctgcattggggccctccgggaaaacaccttcctgctcaagttcttctctgtgttcctcggcctcatcttcttcctggagctggccgcggggatcctggccttcgtcttcaaggattggatccgagaccaacttaatctcttcatcaacaacaatgtcaaagcctaccgggatgatctcgaccttcagaaccttatcgactttgctcaggaatactggtcttgctgtggtgcccgagggcccaatgactggaacctcaatatctacttcaactgcactgacttgaacccaagccgtgagcgctgtggggtgcccttttcctgctgtgttagggacccagcggaagatgtcctcaatacccagtgtggctatgacatccgactcaaactggagctcgagcaggagggctccatctacaccaaaggctgtgtgggccagtttgagaagtggctacaagacaacctgatcgtggtggccggggtcttggtggggatcgccctcctccagatatttggcctctgcttggcccagaacctcgtgagtgacatcaaggcggtgaaggccaactggtgaggctgccaggggtgatggccatgtgcctggcccgtggggctctagtgggggcctcccaggacactctgcctcgctcacaatggcaaggcctgtgggacgtctgttacgacctgagccggaggttttgtgaccttggtgctcattacccactgaggaaaccattggggactagactggggctgtttgccacagagctctgtgtcgggggtgtgtacctgtgtgtgtgcatgcacactcgtaagtgcacctggagtctctaccctgctgctgtgaggtggtggcccttccagagctcgtggggggggggcagatggagggtagggcaggcacctgtgtcccctggtctactgtgggatgtatctgtgtgtggcttaggagcctgctgtctcagacctctccatactcaccatgactttgagcctgcctggagcttgtcttggcctcagtgtcacagcctctgaaatgggtccaagaattctctctctcgcttgcctctcaggatcacacttggcgatggctacaaacgactcaataaacaacactttg

SEQ ID NO: 1321 - DNA, 246 bp, Mus musculus
cggccctcagtctggctgacgaggctgtgggtaaacaactgtccccagagggtcagggcatcatgctgaaaaggctgaggagagaatagcgaacagacaagcctctgcttctccctgcgtttcaaccattataaatttaagtttctaggttccgtgaaatgtaaattttagccctgccagttctttctcgcaatacaaatttaacattcctgaataggttagactgtaataatcctcctcgtgccg

SEQ ID NO: 1322 - DNA, 127 bp, Mus musculus
tttttttttttttttttcatataaaactatttattcataaatattttccaaaatgaaaataggtttaccaaaaaaatgtccctcactggggaggggaggagggggcaccccttgcccccacgccccc

SEQ ID NO: 1323 - DNA, 2840 bp, Mus musculus
ctggcttccgccccggcccctctcctaagtcttccaactcgcgctctcggcacttggccgccagagcccttttggctttgggggtggtcgggatgcccgcttccgggccccgtcgggagagcgttgaaaaacttgctgggaaggttctgggctgtggggtggtggccttgcggaggctcccggcggggagggggccagggacccagaggaggcacggggccgcgtggagcccttctgatgtgcccactcctctcccctatgtgtccttgtgggctccaggcaccccatcaacccgggcagccgggatttaaattcactgtggccgagtcctgtgacaggatcaaagacgaattccagttcctgcaagctcagtatcacagcctcaaagtggagtatgacaagctggctaacgagaagacggagatgcagcgccattatgtgatgtactatgagatgtcctatggcttgaatattgaaatgcacaagcagacagagattgcgaagagactgaacacaatcctagcccagatcatgccttttttgtcacaggagcatcagcagcaagtggcgcaggctgtggaacgcgccaagcaggtcaccatgacggagttgaacgccatcatcgggcagcagcaactccaggcccagcacctctcccatgccacgcatggtcccccggtccagctgccaccccacccgtcaggcctccagcctcctgggattcccccagtgacaggaagcagctctgggttgctggcacttggtgccctgggaagtcaagctcacttggcggtgaaggatgagaagaaccaccatgaactggatcacagagagagagagtccagcacgaacaattccgtgtcaccctctgaaagcctccgggccagtgagaagcaccggggctctgcagactacagcatggaagccaagaagcggaaggcggaagagaaagacagcctcagcagatacgatagcgatggggacaagagtgacgacctggtggtggatgtctctaatgaggacccagcaacaccccgggtgagcccagcacactcccctcctgaaaatgggctggacaaagcccgtggtctgaagaaagatgcccccaccagcccagcctccgtggcttcctccagcagcacaccttcctccaagaccaaagaccttggtcataatgacaaatcttccacacctgggctcaagtccaacacaccaacgccaagaaatgatgccccaactccaggcaccagcaccaccccggggctccggtcaatgccgggcaaacctccaggcatggacccgataggtataatggcctcggccctgcgaacacccatcaccctcaccagctcctatccagcaccctttgccatgatgagccaccacgagatgaatggctccctcaccagcccaagcgcctatgctggcctacacaacatcccatcccagatgagcgccgccgcagccgctgcagccgccgcctatggccgatcgccaatggtgagctttggagctgttggttttgaccctcaccccccaatgagggccacaggcctgccttccagtctcgcctccattcctggagggaaaccggcatactccttccatgtgagtgctgatgggcagatgcaacctgtgcccttcccccatgatgcactagcaggccctggcattcccaggcatgcccggcagatcaatacgctcagccatggagaggtggtatgtgctgtgaccatcagcaaccccacacgacacgtctacacaggcggcaagggctgtgtgaagatatgggacatcagccagccgggcagcaagagtcccatctcccagctggactgcctgaacagggacaactacatccgctcgtgcaagcttctccccgatggcggcacgctcattgtgggtggtgaggccagcacgctcaccatctgggacctggcctcacccacaccccgcatcaaggctgagctgacgtcctcggctccagcctgttatgccctggccatcagtcctgatgccaaagtctgtttttcctgctgcagcgacgggaacattgcggtttgggatctgcacaaccagaccctggtcaggcagttccagggccacacagatggggccagctgtatagacatctctcatgatggcactaagctgtggaccgggggcctggacaacaccgtgcgctcctgggacctacgtgaaggacggcagttacagcaacacgatttcacctcccagatcttctccctgggttactgccccactggggagtggctggccgtgggcatggagagcagcaatgtggaggtcctgcaccacactaagcccgacaaataccagctgcacctgcacgagagctgcgtgctgtccctcaagttcgcctattgtggcaagtggtttgtgagcactgggaaagacaaccttctcaatgcctggaggacgccttatggagccagcatcttccagtcaaaagaatcctcatctgtcttgagctgtgacatttcagcggatgacaaatatattgtaacaggctctggtgacaagaaggccacagtttacgaggtcatctactgaacaaggactctaacaggcctgtcaaactctgggagagacacccacgtggccctgacagggagatgctggccaggcccgaggacggcagaaggagggagcagcattgtggggctgccctccagaaggtggagaggacgcacgcccttcgtggattgatgtgtctgacagacttgaaggactttctcctctccccctaaccagtgctggcagatgcttcaattagatttctctggaggcttctgcttccgtttctcccacgaaaaacc

SEQ ID NO: 1324 - DNA, 165 bp, Mus musculus
gtgtcagtgactgtctgtgtgtgtgcataacatacctaatgtatacctaccaagaaggcagaagtattgtgactttgggatgttgttttttttctgtaaagtgatttaatgggatttttcaggcatagtatttttgttcaggaaataaagatgtttactttttgg

SEQ ID NO: 1325 - DNA, 578 bp, Mus musculus
tttttttttttttttttaataaataggtggcgttttaaaaatcagcatctccaggccggtccacacatgacttgactcagggtagctccaggcacctgcagagcaggagacaggagtgggaggagcatgcagagttcccagcatcccagctctccagagcttgcaggccaggggctttccttcctccagcggaggaaggtggatagacaagcacctctgccacttggccctcaaactgagtgagggtctaggcaatttcctgagagtctgaggaccatggaaggtgctctacgcatcttccctaccctaacctgggatcaacagcagctagcatcctgccagggccctctgcacagtccagctgagtggattctcaagtcgctagccacctgactggtcttctgagcatcacgcattcgggcccagtttaagccagaagggaagagcccccgccctcaactccaggaggagtagacttcagcagagagtgatgactgagggggacagtcttagaggtgacatctttccggtggtcacctttcaggctgggtctcctgcaagcccccgtgatgactgaa

SEQ ID NO: 1326 - DNA, 2181 bp, Mus musculus
gagcgtgagtgggatcagtgtgcacgcacctcccgcagccgagcgctgagcggccactgcagttaactcctccttgcccgccgcgcgaccctcctcggagcccacgctccgccaccatgaagagagctcacccagactacagctcctcagatagtgagctggacgagaccatcgaggtggaaaaggagagcgcggacgagaatggaaacttgagttcggcgctgtgttccatgtccccaacgacatcgtcccaggttttggccaggaaaagacggagaggcatcatcgagaagcgccgacgagaccgaatcaataacagtttgtctgagctgagaaggctggtacccagtgcctttgagaagcagggatctgctaagctagaaaaagctgagatcttgcagatgactgtggatcacctgaaaatgctgcacactgcaggagggaaaggttattttgacgcgcacgccctggctatggactatcggagtttggggtttcgggaatgcctggccgaagttgcccgttatctgagcatcattgaaggactcgatgcctccgacccgcttctcgttcgcctggtctcccatctcaacaactacgcatcccagcgggaagccgcgagcggcgctcacggtggcctcggacacattccctggggaagtgccttcggacatcacccacacatcgcacaccctctgctgctgccccagaatggccacgggaacgctggcaccgcggcgtcacccacggagccgcatcaccagggcaggctggcttctgcccatccggaggcgccggccttgcgagcgccccctagtggcggcttgggaccggtgcttcccgtggtgacctcggcctccaaactgtctccaccgctgctctcctctgtggcctcgctctcagccttccccttttccttcagctccttccacctactgagcccttcgacacccacgcaggcagcaaaccttggcaagccctatagaccttgggggacagagatcggagctttctaaagaactgatgctgtagaacaagggaggggaaagcttaaaatcccaggtgtgttgggacggttgtcaacaccaccctaaagtcgccagtaagtcaggaaaaaggtacattttcagataatttttttctaaagactaaaagtttgttggtttacttttctctttaattttttatcatgtcatgaattagcagttttaaaaaattagttgttaatttttgtttaaaagattcaattgaggtagtgattacgaaccaacactttgatccgttgtttgttctgtgcctcatttattttgtaaacctgtctgtctgagaatgattccgtttgcctcagcgtggggaatcttaacattagtgtttggggtctgtttcctggtgtgtataagttgtaatcttttgaggattaatttcgcacgccactatgctcaatgttaacacgattttgttactactttgatggaccgaggtgttgtataagtggtattctttggggagggagggtcagcaaagcattatatttgcaaacaaagcgttgacaaatcagatgcgcagctttactggagagcactggctctctctctgcctctcagagcagtgaggtgaagggagaaaggtgtctgtgccctgaatccagatgaccagctactgtggcctgcttggcttttctcttctgatatttcaggtttagaaacagctgctggtagtctaggtccccatttggagcgttggcagcaagcaagacagttatgtagaccttgcctgcacttggcagccctaagcactctcagtctcacggatttcaccgttcaccagtgtcgacctgcgtaagcgatcggagtctgaaagtagcttggtgcctgtgaaacacaacccgattttcctagaactcccatattttcttttaagtggaaatttttatgttgtgttttccttttggtgcatgaaaatgtggttcttgcagtacttaaaagggcttctctgccttctcattcatttttaaaattttgatttgggctctaaaagtattgttttacaggcttacccctttagaaggtataatttgaacagctcctctgaactaggtttgacctctgttgtattgatgtgttgtgactaaataaaaagcaaagaacaatataaaaaaaaaaaaaaaaaaaaaaaaaaaaa

SEQ ID NO: 1327 - DNA, 296 bp, Mus musculus
attcgtcgacatgagctgactgggaagaagaaagaagccatatggtacgctctgatcatcccctgcacacagtgactcacttcccgtctaaggaagcaacagcctcccattgccccatagtggccatcttgaggatgggcggccatggggtctgtggaaccggctgttggtagagagaacaagaccttccaagactgccatggttgtctccagaaggactggctgcctacacttacttgagcagaattaaattctatttttgctgattttgaaaaaaaaaaaaaaaaaaaaaaaaa

SEQ ID NO: 1328 - DNA, 1654 bp, Mus musculus
ggagaggagcagacagacccaggactctggcacattcaggtcctactacctgccacctacttctcagcgacacccaggaagatggccggcccgtggattatcaccctcctctgtggtttgctgggagccacactggtccaagctaacgtctatccccctgcagtgctcaaccttggcccagaagtcatccagaaacacctgacccaggcactgaaggaccatgatgccactgccatcctccaggagttgccactgctcagagccatgcaagataagtctggcagtatcccccatactggacagcttcgtgcacaccgttctgagatacatcatatggatgaaggtcacctctgctaacatcctccagctggatgtgcagccttcaacttatgaccaggagctggtggtcagaatccccctggacatggtggctggactaaacacaccactgatcaagaccatagtggagttccaaatgagcaccgaggtccaagccctcatccgggtggagaggagcaagagcggccccgcccacctgaatctcagcgactgctccagcaatgagagcaccctgcgcctcagcctgcttcacaagctctccttcgtggtcaactccttggcaaagaatgttatgaatctcctggtgccagccctgccccaaatagtgaaaaaccacctgtgccctgtgatccagcaggcctttgatgacatgtacgaagacttcctgagactgacaacagcacccattgccctcagtcctggagccctggagtttggccttctgtctcctgctatccaggacagtaatatcctgttgaacctgaaggccaagctgctggactcacaggcgagggtaaccaactggttcaacaactctgcgacttctctgatggagaccaccccagacagggcccccttcagcctgaccgtgaggcaggacctggtgaatgccattgtgaccaccctggtccccaaggaggagcttgtaatcctgctcagattcgtgattcctgatgtggcccgccagttacagatggacatcaaggaaatcaatgcagaggcagccaacaagctggggcccacccagatgttgaagatcttcacccacagcaccccccacattgtgctgaacgagggcagtgccagggcagcccaaagtgtcgtgctggaagtgttccctaccaacactgatgtccggcccttcttctctctcggcattgaggccagttatgaagctcagttcttcacagaagacaaccggcttatgctcaacttcaataacgtcagtattgagcgcatcaagctgatgatctcagatatcaaactattcgatcctgaagtcctgaaggacaccctgaccaagatccttgaatacacactgctgcccaatgagaatggcaaactgagaactggagtccccatgtcaatgtccaaggccttgggatacgagaaagccatgtggtctgtgagcaagggtgccctcaagctcactccagcctcctcctagaaccctggctccccgcccctcctgatgaagacctggacagtagcagccagccccggccaggtcccagccaggagtgtggaagcctactgtgtagactacccccctgcagttaataaacacttgcccgtggaaaaaaaaaaaaaaaaa

SEQ ID NO: 1329 - DNA, 298 bp, Mus musculus
tcttggaggaaaccttgtccaagatcgttgaataaacattgctgcccaatgagaatggcaaattgagaaatggattccccatatcaatttctaagcccttgggatacgagaaacccatgtgttgtgtgagcaagggtgccattaagttcaatccagcttcttcctagaactctggttccccgcccttcttgatgaagacatggacagtagcagccagccccggccagatcccagccaggagtgtggaagcctactgtgtagactacccccctgcagttaataaacacttgcccgtgcc

SEQ ID NO: 1330 - DNA, 302 bp, Mus musculus
gagatcgtgaaagatatcatgaccaagatcctagaatatacagtgatgcctaatgagaatggcaaattgagaactggaatccccatgtcaatttccaaggctttgggatatgagaaaggcatatggtgtgtgagcaagggtgcccttaagctcattccagcatcctcttagaaccttggttccccgcccctcctgatgaagacctggacagtagcagccagccccggccaggtcccagtcaggagtgtggaagcttattgtgtagattacccccctgcagttaataaacacttgcccgtggt

SEQ ID NO: 1331 - DNA, 334 bp, Mus musculus
ggatagaatttcggaaaactgagtggtgaatcgagtagtcctgaacgataccttcgccaacatcgacggatagacactggagcccaaagagaatggcaaagcgaggagtggagtccccatgtcgatgttgaaggcctggggataggagaaagccataagttctgtgagcaagggtgccctcaagctcacttcagcatcttcctagaactttggttccccgcccttcttgatgaagacttggaaagtagcagccagccctggccaggtcccagccaggagtgtggaagcctactgtgtagactacccccctgcagttaataaacacttgcccgtg

SEQ ID NO: 1332 - DNA, 1113 bp, Mus musculus
caggagaggagcccaggacgaccactgagaccttgagactcagacaccaagagagatgtttctagttgggagcctcgttgtcctctgtgggctgctggcccacagcacagcacagctggcaggcttgccattgcccctgggccagggtccacccttgccactgaaccagggcccaccgttgccactgaaccagggccagctgttgcccctggctcagggtctgcctttggctgtaagcccagcactgccttcaaatcccacagatcttcttgctggaaaattcacagatgctctcagcggtggcctgctgtctggggggctgctgggcattttggaaaatattccactcctggatgttataaagtctggaggaggcaattctaatggccttgttgggggcctgctgggaaaactgacgtcatcagttcctctcctgaacaacatcctcgacataaaaatcactgatccgcagctgctagaacttggtcttgtgcagagtcctgatggccatcgtctctatgtcaccatccctctgggcttgacactcaacgtaaatatgcccgtagttggaagtcttttgcaattggctgtgaagctgaacattactgcagaagtcttagccgtgaaagacaatcaggggaggattcatctggttcttggtgactgcacccactcccctggcagcctgaaaatcagcttgctcaatggagtcactcctgttcaaagctttgtagacaacctcacagggatattgactaaagtccttcctgagctgatccagggcaaggtatgtcctctggtcaatgggattctcagcggtttggatgtcaccctggtgcacaacattgctgaattactgatccatggactacagtttgtcatcaaagtttaggcatcccaggaaggaaggctatcttggctgagctgaatcatttcttgctgctcagtctcctgcctcttgcccagtctcccatggctcacagaaaggggcccacatcctggaaaattatgtcttccttctcctcacggagcctgatctcttcccatcaggcacgattaatcctgtgatcctcactaaataaaatagcccttcatctgcaaaaaaaaaaaaaa

SEQ ID NO: 1333 - DNA, 2643 bp, Mus musculus
gtccggcgcgcggctgagcgaccgagcgtgcggacggagcggcggcctgctgggcgggctgagcggcgcgcgcggcggcggagagacgcggagcgagggacgcggcggcggcggacgcggcgacaggtcttctacttacaaaggacaatgactactgatgagggcaccagtaacaatggagagaacccagcagccaccatgactgagcagggtgaagatatcactacgaagaaagacagaggagtattaaagattgtcaaaagagtggggactagtgacgaggccccaatgtttggtgacaaagtttatgtccactacaaagggatgttgtcagatggaaagaagtttgattccagtcatgacagaaagaagccatttgcctttagccttggccaaggccaggttatcaaagcctgggacattggggtgtctactatgaagaaaggcgagatctgccatttattatgtaaaccagaatatgcttatggctcggctggccacctccaaaaaattccatcaaatgcaactctcttttttgagattgagctccttgatttcaaaggtgaggatttatttgaagattcaggcgttatccgtagaatcaaacggaaaggcgagggatactcaaacccaaacgaaggagcaacggtaaaagtccacctggaaggctgctgtggtggaaggacatttgattgccgagatgtggtgttcgttgttggggaaggagaagaccacgacattccgattgggatcgacaaagccctggtgaagatgcagagagaagaacagtgtattctatatcttggaccacgctatggttttggagaagccgggaagcctaagtttggcattgaccccaatgctgagcttatgtacgaggtcacccttaagagcttcgagaaggccaaagaatcttgggagatggacaccaaagaaaagctgacgcaggctgccatcgtgaaagagaagggaactgtgtacttcaagggaggcaagtacacgcaggccgtgattcagtacaggaagatagtgtcctggctggagatggaatacggcctgtcagagaaggagtccaaagcctcagagtcgttcctcctcgcagccttcctgaacctggccatgtgctacctgaagctccgagagtacaacaaagccgtggagtgctgcgacaaggcccttggactggacagtgccaatgagaaaggcttgtacagaaggggcgaggcccagctgctcatgaatgactttgagtcggccaagggcgacttcgagaaggtgttggcagtcaatcctcagaacagggccgctcgcctgcagatctccatgtgccagaggaaggcgaaggagcacaacgagcgggaccgcagggtgtacgccaacatgttcaagaagttcgcagagcgggacgcaaaggaggaagccagcaaagctgggagcaagaaggctgtagaaggagccgctggcaaacaacacgagagtcaggccatggaagaaggaaaggccaaaggccatgtatgacgctgcgccacggagggaagagagtcctaatgaactcggccctcctcgctgggctcgcctccaactcaggactgaacagtgtttagtgtaaggtttgttacagtctctgtgattctggaagcaaatggcataccagtagcttcccaaatgaccacctgctgctgcgggggggtgggggtgggggacatgccaggaaacagcagagaaggccgctggtgtgaagagaccaggccagcagctcagtccagcccatttcagtttgtcacctttcagtgtccagcacagcatccctgtgaacctagggcccagctgctgtgggttctacatcggcactagggtcacactgcagaaaccgttgataaaacaaactcagtgatctctgctttcctattggtgggcatggcaggggcgggtgatgagatttgcttagcactgactgactggcctgctaagaacacaagcccacagccaggggctccctggtccacagctgggtctcaggccccttacctgccttccaagtcctttcgcagactcttgagtgtggctttctgtcctagccagcatgtcccacagactctgttgttcctccaacgcccgtcattagtgacagctttctctctgagtttctgtggtgtggagagtgggtagaagtaggtttatctttcccgctgtctgccccactcaaggacgatgttagcgctcagccatccctgcccagcacagctgctcagcctcatgctcccacccgcacccttgctgtgcagaacctaaggcttgctcccgtcccagactcgagtggacggacatccatgtccacccaggattgacgaaggaaggaacttcacactcctctatcatgcaaaaatagttttcaatttttactttttagcttgggttttgaaaggcaaactctaggaggcttaaaacgggcagttactcttaaggcgaggtagatacctcatcctgcaccgcagcctctgtattctggtgggagctgtaagggttgcgggcttccggtgtccatgcatcaagccaaagtctccaaaacttgggcattgaattagggcaaatcttaaatagttttggggttggattttagtcctacaggtgatgattgaacgt

SEQ ID NO: 1334 - DNA, 793 bp, Mus musculus
gccgaggtgccgcggggttgctggagggtcgtgggcggcgtgcaggagacatgtcggcgggcagcagctgcagccagactcccagccgggccatccccactcgccgcgtagccctcggcgatggcgtgcagctcccgcccggggactacagcaccactccgggcgggacgctcttcagcaccaccccgggaggaaccaggattatctatgaccggaaatttctgatggagtgtcggaactcacctgtggccaaaacacccccaaaggacctgccagccattcctggggtcactagccctaccagcgatgagcctcccatgcaagccagccagagccaactgcccagcagcccggaagataagcgggcaggcggtgaagagtcacaatttgagatggacatttaagggaccagccgtaggacgcaatgatgcttctatgtcccccaaggcccttgggaggagagctgcacagcattcaggcctcataccaggcagacactgggtgtgggtcggccacccagtcctgctcctcactcagggtgccagctctgccttgaattttgtgaacaccagcacatacctccttgtgcctctgtctataccgagctgctactgcaggggaatgactctcactcacaccctccctgcatggagctccagcgagtggactcagaggagtctatcagaatgatctggtaatcctagccccagcctccggagcacacccatctttccttaggctgggttacctgggaaagccacacttttacttctttccctgacaggaaataaaa

SEQ ID NO: 1335 - DNA, 9704 bp, Mus musculus
aacgcgcaggctgctggacgcccgctccctctgtcacctccggctcagatcccttcatgaggctgtgagcttgaggcccaaacatgcagaccaggcttccccgagcgctggccgccctgggcgtggccctactcctgtcttccattgaggcagaagttgacccaccttccgacttgaattttaaaattatagatgaaaatactgttcatatgtcatgggagagaccagttgatccaattgtgggttacagaataacagtggaccctacaacagatgggcctactaaagaatttacccttgcagctagtaccactgaaactctattatcagatcttattcctgaaacacagtatgtggtgactataacttcctataatgaagtagaagaaagtgtgccagtaataggtcaactaacaattcaaacaggtggtcctacaaagccaggggagaagaaacctggaaaaacagaaatacaaaagtgctctgtcagtgcctggaccgacctagtgtttcttgtggacggctcctggagtgtgggaagaaataatttcaagtacattttagacttcattgttgctctggtgtctgcatttgacattggggaggagaagacgagggttggagttgttcagtacagctcagataccaggactgaatttaacttaaatcagtattaccgaagagaagacctccttgctgcagttaaaaaaataccatacaaaggcggcaacacaatgacaggggatgccattgattacttagttaaaaacacttttactgaatctgctggctcacgagctggctttcctaaagtgggaattattatcacggacggcaagtctcaggacgaagtggaaattccagcgcgggagcttcggaatattggagttgaggttttctctctgggcattaaagctgcagatgcaaaagaactcaaacaaattgcatccacaccttccctgaaccatgtgttcaatgtggccaattttgatgcaattgtggacatccagaatgagataatctcccaggtgtgttcaggagttgatgagcagcttggtgagctggtcagtggagaagaagtcatcgagcctccttcaaatctggtagtcactgaactctcatcaaaatacattaggctgagctgggatccgtctcccagcgctgtgaccggctataagatcctcctcacaccaatggcagcgggaagccggcatcacgctttgagtgtggggccccagacgaccacgctcaatgttcgtgaccttacagcggacacggagtaccagatcagcgtttttgccatgaagggcctgacgtccagtgaacccacttcggtcatggagaagacgcagccaaagacgcagccaatgaaagttcaagtggaatgttcacgtggtgtggatataaaagctgacatcgtgtttttggttgatggttcctatagcatcgggactgcaaattttgttaaagttcgagcctttttagaagttcttgcaaaaagttttgagatttctccgaacagggtgcagataagccttgtacagtacagcagggaccctcacaccgagttcacattgaaggagttcaacagagttgaagatataatcaaagcaataaacaccttcccgtacaggggaggatccacaaacacaggcaaagccatgacttacgtcagagagaaaatatttgtgccaaacaaaggttccagaagcaacgtaccgaaggtgatgattctcatcacagatggggagtcatcagatgctttcagggatcctgctataaaactcaggaactccgacgtggagatcttcgcagtcggtgtaaaggacgctgtgcgctcagaactggaagccattgcctctcctcctgctgagacccacgtgttcacagtggaggattttgatgcctttcagaggatatcatttgtactcacacagtccatctgtcttagaattgagcaagagttggcagctataaagaagaaagcttacgttccaccaaaggatctgaggtttactcaggtaactgctaatagtttcaaagctgaatggtctcctcctggagacaatgtcttttcgtatcacgtcacatacaaggatgctaatggtgatgatgaggtcacagtggtggagccagcctccagcactagtgttgttctcaacagcctgaggccagaaaccctgtacttggtgaatgtgacagccgagtatgaggacggcttcagtgttcctataactggggaggagaccactgcagaagtaaaaggagttccacgaaacctgaaggtgacagatgagactacggacagttttaaacttacctggtcccaagctccagggagagtcttaaggtatcggattagatacagaccagtttctggtggagaaagcaaagaagtgagtaccccagccaatcagaggaggaaaacactggagaatctgacgcccgacacaaaatatgaaatatctgtgattgctgaatatccctcgggacctggatctccactgacaggaaatgcagccactgaagaagttagagggaatccaagagacctaagagtttctgatgctacgacatcaacgctgaagttgtcttggagtagggcaccaggaaaggtgaagcaatatcttgtcacatacaccccagcagcaggaggtgaaactcaggaggtcactgtgagaggagatacaaccactaccatgttgaggaaattgaaggaagggacacagtatgacttatctgtgacagcactgtatgcgtctggggctggcgaagccctttctggaaaaggatcaactcttgaagaacgtggctcacctcagaacctagttaccaaagacatcacagacacatcaatcggagcctattggacatctgccccagggatggttcgagggtacagggtctcatggaaatcgctttacgacgacattgaggctggagagacaactcttaatggagatgcaattcatactatgatagagaacctgcagccagagaccaagtacaaaatttcagttttcgcaacttacagcagtggagaaggagagcccgtgaccggagatgccacaactgaattatctcaagattccaaaatcttaagagtggatgaagaaacagaacacacgatgagagttacctggaaagcagcaccggggaaagtcgtcaactaccgtgttgtgtatcgccctcaagggggtgggaggcagatggttgctaaggtgccacccacggtcacttcaacagtgctaaagagacttcaaccccagaccacatatgacatcacagttctcccaatgtacaagacaggagaaggaaagctcaggcaacgctcaggaacaacagcgtctcgatttaaatcgccgagaaacctcaaaacttctgacccaaccatgtcaagtttcagagtgacttgggagcctgcccctggggaagtgaaaggttacaaagtcacattccaccctacaggcgatgacagaagacttggggagttggtccttggaccatatgacaacacagttgtcttggaggagcttagggcaggtaccacctatagagtcaatgtttttgggatgtttgatggaggagaaagtttaccactcgttgggcaagaaatgacaactctttctgacacaactgtgacaccatttctatcttctgggatggattgtctcaccagagctgaagcagacattgtgttgctggtggatgggtcatggagcatcggccgtgcaaattttagaactgtgcgaagcttcatttctcgtattgtagaagtctttgaaattggccccaaaagagtacaaattgctctcgctcagtacagtggagaccccagaacagagtggcagttaaatgctcatagagacaagaagagtttattacaggctgtggcgaacttaccaaacaaaggaggaaataccctcacaggcatggctttgaatttcattcgccaacagagcttcaagactcaagctggcatgaggcctcgtgctcgcaaaattggagttctcattaccgatggaaaatcacaagatgatgtggaggctccatccaagaaactcaaggatgaaggcgtggagctgtttgctattggtattaagaatgctgatgaagttgagttaaagatgattgccactgatccagatgacactcacgcatacaatgtggcagattttgagtcattgtccaagattgtggatgacctcaccatcaacttgtgtaacagtgtcaagggccctggtgacttggaagcaccgactaacttagtaatttcagagagaactcaccgttcttttagagtgagctggacacccccttctgacagtgtggacagatacaaggtggaatactaccctgtctctggagggaaacgccaggagttttatgtgagtcgactagacactagcacagtgctgaaggacctgaagcctgagactgactatgtggtgaacgtgtactctgtggttgaagatgagtacagtgagcctctgaagggcacagagaaagccctgccagtccctgtagttagcctgaatatttatgatgttggccccaccactatgcatgtgcaatggcagcctgtgggaggagctactggctacaccgtatcataccaacctactcgatctccagaaggaacaaagcccaaagagatgcgcgtggagccaacagtgaatgatgtgcagctgactggcctccttcctaacacagagtatgaggtcaccgtccaggccgtcctgtatgacctcactagtgaacctgccaaagctcgggaagtcacattgcctttacccagacctcaggatgtgaaactcagagatgtgacccacagcaccatgaatgtcgtctgggaacctgtgcttggaaaagttcgcaagtacattgttagatacaaaactccagatgaggagttcaaagaggtggaggtggacagatcaagggccagcactatcctcaaagacctctcctctcaaacccagtacacagtgagcgtttctgccgtgtacgatgagggcacatctcccccagcaactgcatatgacacaacccggcgtgttccagccccaaccaacctccagtttactgaagtcacaccagagagtttcagggggacctgggatcatggagcttcagatgtgtctctctacaggataacttgggcacctgttgggaacccagataagatggagaccattttaaatggagatgaaaatactttggtgtttgaaaatctgaaccccaatactccgtatgaagtctccatcaccgccatctatcctgatgagtctgaaagcgaggacctgagtggcacagagcgcacactgcgtctgatacccttaacaacacaagctccaaaaagtggtccacggaaccttcaggtgtacaatgccacatctaacagcttgactattaagtgggatcctgctagtggtcgtgtgcagaagtacagaatcacctatcagccttcaacaggagaaggcaatgaacaaacgatcacagtaggaggacggcagaacagcgtgctcctgcagaaactgaagcctgacactccatacaccatcacggtgtattcccagtatcccggtggtgaaggtggccggatgaccggaaggggaaagaccaaacctctgaataccgtgaggaatttgagagtgtatgacccgtctaccagctctttgagtgtccgctgggaccatgcagaaggcaatcctcgtcagtacaaactcttttatgccccaacatcaggtggcccagaagaactggtcccaatccccgggaataccaactatgccattcttaggaacctgcagccagatactccatacaccatcacagtggttccggtctatacagaaggtgatggcgggcgcacatcagatactggaaggacattggtgagaggactgtcaagaaacatccaagtgtataaccctacgcccaacagccttgatgttcgctgggaccccgccccagggccagtgcagcagtaccgcattgtgtactcccctgttgctgggacaagaccctcagaatctattgtggtgccagggaatacccgaacggtgcatctggagaggttgattcctgacacaccctactctgtgtacatcgtggctctctactcagatggagaggggaatcccagccccagccagggccgaacacttccaagaagtggaccaaggaacatacgggtctttggggagacgaccaacagcctctctgtagcctgggaccatgctgatgggccagttcagcaatacaggatcatctactctcctactgtcggcgatccaattgatgaatataccacagttccaggcagaagaaacaatgtaatactgcagcccttgcaacctgacactccatataaaattactgtcattgctatttatgaggatggagatggtggtcacctaactggaaacgggaggactgtgggtctgcttcctcctcagaacatacacatcttcgatgaatggtacacaaggttccgagtgtcctgggacccttcaccctcaccagttcttggatataaaattgtgtacaagccagtgggttccaatgagcccatggaagcctttgttggagaagtgacatcatacactttacacaacctcaatcccagcactacctatgacgtcagtgtttatgcacagtatgactctggactcagcgttcccctcacagatcaaggcaccacattgtacttaaatgtgacagatctgaaaacttaccaggttggatgggatacattctgtgtcaagtggtcacctcaccgggcagccacctcctacaggctaaagctaagtcctgcagatggaaccaggggacaagaaataaccgtgcgaggatcagagaccagtcattgcttcactggtctctccccggaggctgagtacggcgttactgtttttgtgcagacaccaaatctcgaggggccgggtgtccccatcaaagaacagaccactgtgaaaccaacagaggctcctacagaaccacccacgccttctcctcctcccactattccacctgcccgtgatgtatgcaaaggggccaaggcagatattgtgttcttgacggatgcctcttggagtattggagatgacaattttaacaaagttgtaaaatttatctttaatactgtgggggcctttgatgaagtcaaccctgctgggattcaggtttcttttgtgcagtacagtgatgaggtcaagtctgaattcaagctgaacacatacaacgataaagctctagccctcggagccctccagaacattcgctacagaggaggaaacacaagaacaggcaaggccctcacatttatcaaggagaaggtcttgacctgggagagcggcatgagaaagaatgtccgagtgctgggtgtggtcacagatggccggtcgcaggatgaggtgaagaaggcagcctttgtcatccagcagtcagggttcagtgtattcgttgttggtgtggctgatgtggactacaacgagcttgccaacattgccagcaagcccagcgagaggcatgtattcatcgtggatgactttgaatcttttgagaagattgaggacaatctgatcacatttgtttgtgaaactgccacttcaagttgccctctcatctatcaggatggctacacatcaccaggctttaagatgcttgaagcttacaacctgacagaaaagaattttgcttctgtccaaggagtctctttggaatccggatctttccctgactcttcagcctacagacttcagaagaatgcctttatcaatcagcccacagcagaactgcatccaaatggactccctccttcgtacacgattatattattatttagacttctcccagaaactcctagtgacccctttgcaatttggcaaattacagacagagactacagaccacaagttggagtgattgcagatccttccagcaagacactatctttctttaataaggatacaagaggggaggtacaaactgttacatttgacacagatgaagtgaagacattattttatggaagctttcataaggtccatattgtagtgacctcaaagagtgttaagatttatattgactgctatgaaattatagaaaaagacatcaaagaagctggaaatataacaactgatggctacgaaattcttggaaaacttcttaaaggagagaggaagtcagccacattccaaatccagagctttgacattgtctgcagcccagtgtggaccagtagagacagatgctgtgatattccctctaggagagatgaagcaaaatgccctgcccttccgaatgcttgcacgtgtacccaggacagcgttggacctccaggccctcccggtcctgcaggaggacctggcgcaaaaggtcccagaggtgaaagaggcatcaatggggcagttgggcccccaggtccccgtggagatactggccctccaggccctcaaggtcctccaggcccccagggacccaatggactctccattccgggcgaacagggtcgccagggaatgaaaggtgatgcaggagagccaggccttccgggacggacaggaaccccaggattacctggcccaccaggaccaatgggaccaccaggagacagaggtttcactggaaaagatggtgcaatggggcccagaggtcccccggggccaggctctccaggagtcacagggccaagtgggaaaccaggaaaacctggagaccatggcagacctggtcaatctggcttaaaaggagaaaaaggtgataggggagacatcgcttcccagaacatgatgcgagcggttgcaagacaagtctgcgaacaactgatcagtggccagatgagcagattcaatcagatgctgaatcagattccaaatgattaccactcaagtcgaaaccagcctggcccaccagggcctccagggccccctggcagtgctggagccagaggagaaccagggcctgggggtcgaccaggattccctggcacgcctgggatgcaaggaccccctggtgaacgaggtttgcctggagagaaaggtgaaaggggtactgggtctcaaggaccccgaggaccgcctgggcccccaggtccacaaggcgaatcccgaacgggtccaccagggtctacaggttcaagaggccctcctggtccccctggtcgtccaggaaactcaggtatccgaggccctccaggtcctcctggatattgtgattcatcccagtgtgccagcatcccgtacaatgggcaaggctatccaggtatgttgctgccatcataaggactccagtttcccagaaataaagagccctaggattgaaggcaggtcgagatagggatctcgtggcgatccaacattttcggttctgtattttgagtatgcgacagtgttctaaagcacaaaacactttccataattagggatttaaggtagccattttcccctcctgtatttctggatttgccaaaccacaccattaacttctctacaactctttggggagttaaatgaatgctaccaattcattaggtttcttttttttttttctttctttttatttattatttttacctaaaggaacagagagactaaaaaaatgaaatagtgttatagaatgctgaaaatacatatgaaaattatttctgcaatccaatctacatataatagcaaacaaaatgcagacaagtgaaagaattc

SEQ ID NO: 1336 - DNA, 3304 bp, Mus musculus
  misc_feature (3229)..(3231): "n" = a, t, g, or c.
ggtggatcctccaacccgctcccataaggctttggctttccaacttcagctacagtgttagctaagtttggaaagaagacaaaaagaagaccccgtgacagctttgctgttgttgtttgccttagttgtcctttggggtctttcggcataaggctgttgtgcttatagtggtgctatcttcggttcctctcactcctgtgaacaagctcccgggcaagagcagctaaagctaccagcatcagaacaaacacggggagaacgcctggtgtcatgaccaaggcaagagatcaaacccatcaggaaggatgctgtggatccttagcaaactacctgacctcagcaaaattcctcctctaccttggccactctctctccacttggggggatcggatgtggcactttgcagtgtctgtgtttctggtggaactctatggaaacagccttctcttgacagctgtctatggactggtggtggcaggctctgttctggtcctgggagccatcattggtgactgggtggataagaatgccagacttaaagtggcccagacgtcactagtggttcagaatgtgtccgtcatcctctgcggaatcatcctgatgatggttttcctacacaagaatgagctcctgaccatgtaccatggatgggtccttactgtctgctacatcctgatcatcactattgcaaacattgcaaatttggccagtactgccactgcgatcacaatccaaagggactggattgttgttgtggcaggagaaaacaggagcagattagcagacatgaatgctaccattagaaggattgaccagctaaccaacatcctggcccccatggctgtcggccagattatgacatttggttctccagtcattggctgtggttttatttccggttggaatttggtgtccatgtgtgtggagtacttcttgctctggaaggtttaccagaagacccctgctctggctgtaaaagctgctctcaaggtagaggagtcagaactgaagcagctgacctcacctaaagatactgagccaaaacctttggagggaactcatctaatgggtgagaaagactccaacatccgtgaacttgaatgtgaacaagagcccacctgtgcctcccagatggcagagcccttccgcactttccgagatggatgggtctcctactataaccagccagtgtttctggctggcatgggcctggctttcctctatatgacagtcctgggctttgactgtatcactacagggtacgcctacactcaggggctgagtggatccatccttagtattttgatgggagcatcagcaataactggaataatgggaactgtggccttcacctggctacgtcraaaatgtggccttgttcggactggtctattctcaggactagcccagctttcctgtttaatcttgtgtgtgatctccgtattcatgcctggaagccccttggacctgtctgtttctccatttgaagatatccgttctaggtttgtgaatgtggagccagtgtccccaactaccaaaatacctgagaccgtctttacaacagaaatgcatatgtccaacatgtctaatgtccatgagatgagtactaaacccatccccatagtctctgtcagcctgctgtttgcaggagtcattgctgctagaatcggtctttggtcctttgatttgacggtgacacagttgctgcaagaaaatgtaattgaatctgaaagaggcattatcaatggtgtgcagaactccatgaactaccttcttgaccttctgcatttcatcatggtcatcttggccccaaatcctgaagcttttggcttgctggtattgatttcagtctcctttgtggcaatgggacatcttatgtatttccgatttgcccagaagactctgggcaaccagatttttgtttgtggtcctgatgaaaaagaagttacagatgaaaatcaaccgaatacatctgttgtataaaaatagtttagctgtggcccctgttactagattgtggagagcatgtgtgcttattttgtactgcagaatcccaataaatgcctgcatttctctctggttttaccacctctgtgccttaagggctaggascactaactaaccatcgccagcaaagatggttatttctccttacatgtaaacatgggaaaataggaagagggagaggcagtcagcgtgtgtatagaaagggcttaatggtaaaatgaacttcccttactcttataagtatattaaattttgaagagtggttgtcaggtgagtaaaattattccttagcagatatttattatctactagaataataaatcaattcaccctaaaactcactcttgtaaaagtttgccccacttccttttttaagatcagtgatatttttbtcagttacattacagaaacaagtttttcctccatgtatgaaggttatagttagataatgagtgttatccttattaatcccattgaacttaaggaawttwttgwatgtggaggatgaaatgtgtaactagacttgtccaaaaggttcatggaataacttttgcattttgaccatcagaaagggcraaatattacagtaatgtgtgtatggtggctcttcataaaatgactctcaaaatctgcagaaagaagraaagttgtaggtttctagtgtggtacagaaggacttaaggcttgttattagtgtgattgtagaaactggaagctaagggtgaggacctcatgtaaccagagtcactgtcatcagccatcactayctatcttggtaaatgagagagctgacctggcaccttacaggcagaaaagcggcccacactaagaaaggactgcaaatcagtgartctgtatagaacattttaccttcactgacttgggccgatgtgtttgtcatctctgtgtttttctagagcaacaatagtcacaaaagttcccctttcaatatccctgagaagaataaagaaaaaactgtttgtaaatatttttttaaaactgttctgcaagtctttttgtaacatgcagtaccaacatgggacattgccttaacttttgatgcactttcatggagactgactgccatgcattgctgtgagcactttctttgtcgttcagtttaatcttttccttcacctttattacagtatgacataatgatttactatgttgtcaaagcttcataaaatatttctatataaaatgtttgtagaatcttcannngcctttactgagttgtgttctcccaattattgttacttatttcaaaattagcatataaaaagtgtttgatatc

SEQ ID NO: 1337 - DNA, 3516 bp, Mus musculus
atggatgcgctcatcatcccggtgaccatggaggtgccgtgcgacagccggggccaacgcatgtggtgggctttcttggcctcctccatggtgactttcttcgggggcctcttcatcatcttgctctggcggacgctcaagtacctgtggaccgtttgctgccactgcgggggcaagacgaaggaggcccagaagataaacaatggctccagccaggcagatggtactctcaagccagtggacgaaaaagaggaggtggtggcagccgaggtcggctggatgacatctgtgaaggactgggcaggggtgatgatatccgcccagacactgactggcagagtcctggttgtgttagtctttgctctcagcattggtgccctcgtaatatacttcatagactcgtcaaacccaatagaatcctgccagaatttctacaaagatttcacattacagatcgacatggctttcaacgtgttcttcctcctctactttggcttgcggtttattgcagccaacgataagctgtggttctggctggaagtgaattcagtagtagatttcttcacagtccctcctgtgtttgtgtctgtgtacttaaacagaagttggcttggcttgagatttttaagagctctcagactgatacagttttcagagattttgcagtttctgaatatccttaaaacaagtaactccatcaagctggtgaatctgctctccatatttatcagcacgtggctgactgcagctggattcatccacttggtggagaattcaggggacccatgggaaaatttccaaaacaaccaggcacttacgtactgggaatgtgtctacttactcatggtcacaatgtctacagtgggttatggggacgtttatgcaaaaaccacacttggacgcctcttcatggtcttcttcatcctcgggggactggccatgtttgccagctacgtccctgaaatcatagagttaataggaaaccgcaagaaatacgggggctcctatagcgcggttagtggaagaaagcacattgtagtctgtggacacattactctggagagtgtctctaacttcctgaaggactttctgcacaaggaccgggatgatgtcaacgtggagattgtctttcttcacaacatctcccctaaccttgagcttgaggctctgttcaaacggcatttcactcaggtggagttttatcagggctctgtcctcaatccacatgatcttgccagagtcaagatagagtcagcagatgcatgcctgatccttgccaataagtattgcgctgacccggatgcagaagatgcctccaacatcatgagagtgatctccatcaaaaactaccacccaaagatcaggatcatcactcagatgctgcagtatcacaacaaggcccatctgctcaacatccccagctggaactggaaagagggtgatgacgcaatatgccttgcagagctcaagttgggtttcatagcccagagctgtctggctcaaggcctctccacaatgcttgccaatctcttctctatgaggtcattcataaagattgaggaagacacatggcagaaatactacttggaaggagtctccaatgaaatgtacacagaatatctctccagtgccttcgtgggtctgtccttccctactgtttgtgagctgtgttttgtgaagcttaagctcctgatgatagccattgagtacaagtctgccaacagagagagccgaatattaattaaccctgggaaccaccttaagatccaagaaggtactttaggatttttcatcgcaagtgatgccaaagaagttaaaagggcatttttttactgcaaggcctgtcatgatgacgtcacagatcccaaaagaattaaaaaatgtggctgcaggcggcccaagatgtccatctacaagagaatgagacgagcatgttgttttgattgcggacgttctgagcgtgactgctcgtgcatgtcaggccgtgtgcgtggtaacgtggacacccttgagagaaccttcccgctttcttctgtctctgttaatgattgctccaccagtttccgtgcctttgaagatgagcagccgccaaccctgtcaccaaaaaaaaaacaacgtaatgggggcatgaggaactcgcccaacacctccccgaagctgatgaggcatgaccccttgttaattcctggcaatgatcagattgacaacatggactccaatgtgaaaaagtacgactccactggaatgtttcactggtgtgcacccaaggagattgagaaagtcatcttgactcgaagtgaagctgccatgactgtcctgagtggccatgtcgtagtctgcatctttggggatgtcagctcagccctgattggcctccggaacctggtgatgccacttcgtgctagcaactttcactatcatgagctcaaacacattgtgtttgtgggctccattgagtacctcaagagggagtgggaaacactgcacaacttcccgaaagtgtccatattgcctggtacaccattaagtcgggctgatttaagggctgtcaacatcaacctctgtgacatgtgcgttatcctgtcagccaatcagaataatattgatgatacttcgcttcaggacaaggaatgcatcttggcgtcactcaacatcaaatctatgcagtttgatgacagcatcggggtcttgcaggctaattcccaaggattcacacctcctggaatggacagatcatcacccgacaacagcccagtgcacgggatgttacgccagccgtccatcacaactggggtcaacattcccatcatcacggaactcgtgaatgataccaatgttcagtttttggaccaagacgatgacgatgaccctgacacagagctgtacctcacacagccctttgcttgtgggacagcatttgccgtcagcgtcctggactcactcatgagcgcgacatacttcaatgacaatatcctcaccctaatacggaccctggtgacaggaggagccacaccagagctcgaggctctaatagctgaggagaatgcacttcgaggaggctacagcactccgcagacattggccaacagggaccgttgccgagtggcccagttagccctgttagatggtccctttgcagacttaggggatggtggttgttatggtgatctgttctgcaaagctctgaaaacatataatatgctttgttttggaatttaccggctgagagatgcccacctcagcacccccagccagtgtacaaaaaggtacgtcatcaccaatcctccctacgagtttgagctcgtaccaacagacctgatcttctgcctgatgcagtttgaccacaacgctggccaatcccgggccagtctgtctcattcctcccactcctcacagtcgtccagtaagaagagctcctccgtccactccatcccgtccacagcaaatcggccgaaccggcccaagtccagggagtcccgcgacaaacagaacagaaaagaaatggtttacagatga

SEQ ID NO: 1338 - DNA, 4039 bp, Mus musculus
  misc_feature (3326)..(3326): "n" = a, t, g, or c.
ggggtgcctcctgctgtcccttacctgcgaagggagcgctgatcatggctccttggcccgagttggaaaatgcccagcccaaccccggtaaattcatcgagggggcctctggaccacaatcgagcatacctgccaaagacaaggaggccagcaaaacaaatgacaacgggactcctgtagccaagactgaactgctaccctcctattccgccctggttctcatagaggagcatcccgaggggacggacccctgggacctgcctgaactccaggacactgggatcagatggtcagagagagacaccaaagggaagacgctctgcattttccagggggttgggaagttcattcttctcctggggtttctctacttgttcgtgtgctccctggatgtactgagcagcgccttccagcttgttggaggcaaagtggccggacagttcttcagcaacaactccatcatgtctaatcctgtggctggactggtgataggggttctggtgacactcatggttcaaagctccagcacctcttcctccatcatcgtcagcatggttgcttcttcattgctgacggttcgggctgccatccccatcatcatgggcgctaacattggaacctccatcaccaacacgatcgtggcgcttatgcaggcaggagacagaaatgagttcagaagggcatttgcaggagccactgttcatgacttcttcaactggctctctgtgttcgtgctcttgcctctggaggctgccacccattacctggagatcctgaccaaccttgtgttagaaaccttcaagttccagaatggagaagatgccccagacattctgaaagtcatcacagaccccttcacaaagctcatcatccagctggataaaaaggtcatccaacaaatcgcaatgggtgactcagcggcccagaacaagagcctgatcaagatctggtgtaaaagtataaccaatgtgactgagatgaatgtcaccgtcccctcgactgataactgcacctctccttcatattgctggactgatggcatacagacctggaccatccagaacgttacccaaaaggagaacattgctaaatgtcagcacatcttcgtgaacttcagtctcccagaccttgctgtgggcatcatcttgcttactgtctccctggtggtcctctgtggctgtctgatcatgatagtcaagctgttgggttctgtgctcaggggacaagtcgctactgtcatcaagaagaccctgaatactgatttcccctttccctttgcttggctgactggctacctggccatccttgtgggggcaggcatgaccttcatcgtgcaaagcagctctgtgttcacgtctgccatgactccactcatcggtattggggtgatcagcattgagagggcatatccactcacgttgggctccaacattggcaccaccaccaccgccattctggctgctttagccagcccaggcaacaccttgaggagttctctccagattgccctgtgccatttcttcttcaacatctctggaatattgctttggtacccaatcccattcacccgtctgcccatccgtctggctaaaggcctaggcaacatctctgccaagtatcgctggttcgcagtcttctatctcatcttcttcttctttgtgaccccgctgacagtgtttggcctgtctctggcaggctggccagtgctggtgggcgtgggcgtacccatcatcctgctgctgctcctggttctgtgcctccggatgctgcagttccgctgccctcgcatcttgcccctgaagctccgggactggaatttcctacccttgtggatgcactctctgaaaccctgggacaacgtcatctccctggccaccacctgcttccagaggcgttgctgctgctgttgccgcgtgtgctgccgtgtctgctgcatggtgtgcggctgcaagtgctgtcgctgcagcaagtgctgcagggaccagggagaggaagaggaggagaaggagcaggatatcccggtcaaggcttctggggcctttgacaatgcagctatgagcaaagagtgccaagatgagggcaagggccaagtggaagttctgagcatgaaggccctgtccaacactacagtgttctaggggcacctaggagtcaggggtgaggaggacctcaggtcccatgggatccaccccttccgtaagcgtctccagctacctcgctaggatttctgatgaggaagaataacaccaactctagctctcctaccaccagagtaacagtctgtagttgaattggacttatcttctctgcttctcaagtgcctccctcttagaagacaatacagagaggcctcagatgacttcatccacctctggctttcaaagccaatcctcacccaaaggtcaagtcttaagggaggcattagggaaggttctggaaagacccaatgtaaagagtatttgtaaatatatgtacaaagcagtcatttcttggtatgaaacctcagccacatctttttttttttttatcaaagtctactccccctactcaatagctcctcctcctattcgtccctgccccagagcagccaagtccaaacagtgaagtaatggcttggagcccatagatgtaagcctccatagcttacattgcaggagatgttctctatggaggaggcttcatctgggtatagtcagatcaagcagttgaccccagtgtcctcagcttcagcttcctaggatggagagacacatggttggggttcatatttggtttctgtacatagggctctggattaatctagaataggaggcattggtgttcttggtcagagtaatattgctgatggaacctgtaagacctgtgtcccaagccctctccgttgctaccactcgggaccatctgcttgtgaagggtctgtttatcttgttttgtgcaaggaggagataggaaatggctagatgctcttaagagtcaagatgaagccagtagggtttggagtgactgcaggtaaagggtgggatcctattcatacaggatacctgtgccttttagagcccacgtgtaatacccacaatggctctgcaaccatccccataactccccccacctcccataagaacaagcctcagcttgacttagggcaggtgtggctccataggaccatgtcctctccatcctctcccatcatgctcttcgccataggaagaggtggagatgccaaactgagccctctgtagataaaagttcccaaagacccatttatgtggcatatttatagctatgcatctgtacagaatacttcataacttatacatagtaaatantgatttgttttatagtgtctcatttggaaatgaggcagggttcttttatgtactgtgaaaagagcacctttgtatattttgtaatactgcctttaaacacaactctctgaggccacgctatacctccctgtaaatatgtaagttacaccccaggaggtggctttgccctctgttgattatatatattttttctttttaaaaaaatgggatccttgttcccatgttaattgtatttttttaaactggttgaggaaagggggaaataaaaatcacaccccaagccccccgccccccgcaagtgtgctgcttccaattgcagggtgacaggaggtatctttccctactcaaacctcaccatgcatcaccacgggaagctatgtagtttctggtgacactttgggacacagaggacttagtcccaccttcagttttctcttttccaagtcatggggataagctactgagagctatgctaagcaaagcataacattttgtagttaatgaatgttaccaggtttggaagcaaagactcgggtggaatctttgaaatcacacagttgatgttttgaaactatgtgcaggccatcttctgtcttgtttttaaaatttctacattagagggggaagggggcagtgagtgggatgtaaattgaataagtaaaaatttaaaaataaaaacaaattaattccagtactgtaaaaaaaaaaaaaaa

SEQ ID NO: 1339 - DNA, 2433 bp, Mus musculus
gaagaaaggctgattagaaaatttgaagctgaaaacatctccaactacacggcccttctgctgagccaggatggaaagacgctgtatgtgggggcccgagaggccctctttgcacttaacagcaacctcagcttcttgccaggcggggagtaccaagagctactgtggagtgcagatgctgacaggaagcagcagtgcagcttcaagggcaaggacccaaagcgtgactgtcaaaactacatcaagatcctcctgccactcaacagcagccacctgctcacctgtggcacggccgccttcagccccctgtgtgcttacattcacatagcgagctttactttagcccaagatgaggccggtaatgtcattctggaggatggcaagggtcattgtccctttgaccccaacttcaagtccacggctctggtggttgatggtgagctgtacactggaacagtcagtagcttccagggaaacgacccagccatttcccggagccagagttcccgccccaccaagactgagagctccctcaactggctacaagaccctgcctttgtggcctcggctacgtcccccgagagcctgggcagccccataggtgatgatgataagatctacttcttcttcagcgagacgggccaggagtttgagttctttgagaacaccatcgtgtcccgagttgcccgagtctgtaagggcgatgagggtggagagcgggtgttgcagcaacgctggacctcctttctcaaggctcagctcctgtgctcccggcctgatgatggctttccctttaacgtgctacaagatgtcttcaccctgaaccccaaccctcaggattggcgcaagaccctttctatcggggtctttacctcccagtggcacagagggaccacagaaggctctgccatctgcgtcttcaccatgaatgatgtgcagaaggcctttgacggcctgtacaagaaagtaaacagagagacacagcagtggtataccgagacccaccaggtgcccacaccgcggccgggagcgtgcattaccaacagtgcccgggaacggaagatcaactcgtccctgcagctcccagaccgagtgctgaacttcctcaaggatcacttcttgatggatgggcaggtccgcagtcgcctgctgctgctgcagcccagagcccgctaccagcgtgtggctgtgcaccgtgtgcctggcctgcacagcacttatgatgtcctatttctgggcactggtgatggccgcctgcacaaagcagtgaccctgagctccagagtccacatcattgaggagctgcagatcttccctcaaggacagcctgtgcagaacctgctcttggacagccatgggggactgttgtatgcctcctcccattccggggtggtgcaagtgcccgtagccaactgcagcctgtacccaacctgtggagactgcctcctggctcgagacccctactgcgcctggactggctctgcctgcaggctcgctagcctctaccagcctgatctggcctccaggccatggacccaggacattgagggtgccagtgtcaaggaactctgcaagaattcctcatacaaggcccggtttcttgtgccaggtaagccatgtaaacaagtccagatccaaccaaacacagtgaacaccctggcctgcccactcctctcaaacctggccactcggctctgggtgcacaatggagccccagtcaatgcctctgcctcctgccgcgtgttacccaccggggacctgctgctggtgggcagccagcagggtttgggggtgttccagtgttggtcgatagaagaaggattccagcagcttgtggccagctactgcccagaggtgatggaggagggggtaatggaccaaaagaaccagcgtgatggtaccccagtcattatcaacacatcacgagtgagtgcaccggctggtggcagggacagctggggtgcggacaagtcctactggaatgaattcctggtgatgtgtactctgtttgtgtttgctatggtgcttttgtttctgttctttctctaccgacatcgggatggcatgaaactcttcctaaagcagggcgagtgtgccagtgtgcaccccaagactcgccctatagtgctaccacctgagacccgaccgctgaatggtgtcggccctcctagcaccccacttgaccaccgaggctaccaggctctgtcggatagctccccagggcccagagtcttcactgaatcagagaagaggccactgagcatccaggacagctttgtagaggtgtctcccgtgtgtccccggccccgagttcgactgggctctgagatccgagactctgtggtatgagagctgactttagatgtggtcaccctgacctcagggttgtgagtgtcagtggaagtcagctacctctgctctcacagaacacag

SEQ ID NO: 1340 - DNA, 515 bp, Mus musculus
tttttttttttttttttaaaggcaaataaggtttttatttaagtgacaatatttcagagttaaaaacagctcacatcaaaatcaagaccaattgtaaaaatcttttaactccgtaatgctgtttttttgtcttgttagaaatcgggtattttacattttcttttctaacggattttgtacaaggcagccatgaggactaaaatatcacaggaccatccaccacagagtggactggaagttacacacagggacaggcagaccgcagacaaggtcagactggctgccaccactgagtaaacagagaaagggacagtgggtctgagtctgagggggaatgtctctcactagccaccctcctggcctcccgctcctggtgtcccccatctcttccaaagtgtggactcaaactctgatatttcttcctaaccttcctattagtttcccaacaagatcagaactcaaccgggccttgctacttgtactaaacgtttaacttgggtgtataagaaattcct

SEQ ID NO: 1341 - DNA, 544 bp, Mus musculus
tttttttttttttttttcctgttttatataggatgcttcttttaatgcagccaaaaatgatatttgcttttctcaaaaccatgaccataaaggatgcagtgaccaattcattctgcaaaacgcctgggctccatcaggggccaggagacacaagtgatatcaagcccttcaaggagctagaggtggcatgaaccctcagctaagctttgggaagcctgctgagggcagggcttggccgtgcaagagaggctggcagaggcacggggacgggcaggcagggtcaccactgctcatcaaactccctcgggcaggggcggccatctgtgtgcctggtagactcttaacagcttccaaagtagggaaggacacgtgcagttcaggggatcctgacagtggttaccttccacctgcctgctgccagggacccttgtgtgggcctcttccagtcaccggaaggtctctggagcatgcctgccttcttctacctctgagagactgaagggaggtggtgtaatactgcctaagtacttagcttttcaccagt

SEQ ID NO: 1342 - DNA, 542 bp, Mus musculus
  misc_feature (373)..(374): "n" = a, t, g, or c.
tttttttttttttttttggatttaaactttattacaaaattataaagcagagctctgtaacaaaaaaatacacatttgggtatgcttttaacacccaggtgagaaaatcttaatgtaagccacttggagctacacatttacatccgagagatctcaacaaatttgtacaacatagactattaattcctttacagcttattagtttagaaccggctatttccaacctatgaaacagcatctttgaaaactaagtctcaactgaaatcttggtgcaatcagcaaaatccacagaataattggaaagattaggtgtttcaacattaagaccaaggatccgtgaagaacaaaaagggggctcaggtatttaaccaannaaaaaaaaaaaaaaatttaaggttttctacctgagatgttaactggaatgggttccaactttcatttggtttaacaataaagttgtttgacatgttttggtttttttcccccccaaatgagaacaccaagggtaaagatttaaaggtaagatcgccaaattaaatggc

SEQ ID NO: 1343 - DNA, 528 bp, Mus musculus
atagtcacatggaagctgccagcctgctctgccagggggagccttaaccactgataaggctgagggacagaagagaattcctgctcttctgaggagtacagtatgtcttccagggtccaagccactctcctcaggctttgagtgctgagtccaggtctggcagcgaacaagcctcatacccaaccttgtcgtctttccttcgatagtacattcgtgtcagcactgtcatcaggaaggtctccagtatgagcatgtggcagttcatcacttgagacctgattttagaagagtagggaggtgagcaagcgatctgcccactgttagccaagatggagaaaatggcaggctgcagggcggtcaggatgacaagcacctggaacagagcaaacttggatcccatgttctgttcacccagatgcatcttggcttgacggaaaaggatggccagggaccagagggccagaagggtagacacagcaaggagattgttgatccagagagctgcgctcttctcagaaatttctcctg

SEQ ID NO: 1344 - DNA, 2304 bp, Mus musculus
  misc_feature (430)..(430): "n" = a, t, g, or c.
acacgccccgagacagcccggggcccgcactgcagccgccgcccgcgctaagccggggcgcggctcgcagccctagctctgcggcaacatgagccaagccgagctgtccacctgctcggcgccacagacgcagcgcatcttccaggaagcggtgcgcaagggcaacacgcaggagctgcagtcgctgctgcagaacatgactaactgcgaattcaacgtgaactcgttcgggccggagggccagacagcactacaccagtcagtcatcgacggcaacctggagctggtgaagctgttggtcaagttcggagccgacatccgcctagctaaccgcgacggctggagcgcgctacacatcgccgctttcgggggccaccaggacatcgtgctctatctcatcaccaaggccaagtacgcggccagcggcggngtgatagccacccggactccggcccctggcccccacccgcgtcgtctctgctgtaccttcccgccaactacctcggtgtgcgccaggtttgctggtccgcgtggaaatcgggctaagtctctacgtccgcggccacgaccaaagtagcgcatccgtggaccccagggttcggctctccgcaaaagagcgcctccccttggcagtcctctgagccccgcggggccccagagccttcccacggccccgaccgcctagagggtgggggcggggcgcaggctccagtccgttttgaaatttgagtctcacaccgggagacttcggaatcccgagataccggatcctccgcttgaaatgttttctccggaaggtgaaaggcgcgggcggactcgcgctccagccgccgctcgtgagacccggccgctcacagtgcggcgcccgccgctggcagccgccaaacaaccattaccgggctccaccatctgcgcgccctcgcacttaggaagggaaggggacgctccgggttcctgatgtcctcaactatttatcacgtgtgtgtatatttgtgggtgaagtttgtgcgcctgagttttttgtttggaaatattgtgcgtggttatgggagaaagatgcattttttttcctttaaaactaaaaacttgagtctaccattttttggttgcactgaaaataccgcctagccctatggttttcccattgctagcccctcccccaccgagtccctaatcttccacacctcattcctcttttcctctccctggattctgagtttagagagcctaggatctgtctccctttcccctcccgtgagaggccaccattccccacacaggctggtttagcaaagttccaaagggctcttgaagcccgcgtggctgggacgtggggattctgagagcatggtacccttcctagtgacttctattatagttaatagtcggttgcacacttttttaaaaaagtaaatgaatttgccacgattaaatgtcataacatttatgacagaatataaaatattaacatattttaagccaagttttaggtgtatttttttgaatcttggttatgaacccaattttaaagggcgttgtatccagcgttgtgaaggctgttgtgtacccatatttatatttttataaaattcctataaagactgtgaatctctcatactattgctgaatgagtggaagggctgctgtgctctttctgccttccccaatccccatccccaccctcaaaccctgctccaaggccctattatgatctgaggatccagccatgagggaggggctgtgccaaggaccagggctggaggaggtgctggagcgtcactggctgtcccagaaaggagacttcctggtttctgtggttccaattttctatgcatctccattccccttcttgttttgatcctgggaaataaaagggaggctgaattattcaaatttaaatgaggtttccccttcgtagaagtgctgctgaccctgcgtgcaaaaatggggagcacttgaggacacaggtgggtggagccctttgtgccgcctggccatattcttcggtcttctgcgcttttatgaaccagtgtgggaggaatagtgataatgtcatgagaatggcagacactgagacaagcacagattacttcaaaaggagttctgtatggtttttctacacgcaaatgcctttttaattatgttaattaatgttaaaacgtactgggcctatgttgaagcttcagatgggtcctggttggtctcttctatctgtatgaagtctgtggcacactcctaagcgtacgatatagacttgtagcccatcgtgaaaaatttataaataaatttttcattggtcttttt

SEQ ID NO: 1345 - DNA, 323 bp, Mus musculus
ctttcgcagacccacagaatttgccattttaatttccttaagttttttattcttgaatacgtggcatttcccataatcattaaaaaattgttggggtattgagtttattttattctgctttgatttttttctgagggtgacgcccttggagggtgttgggtttttacgtgctggtaacatattcaggcccattcacttggggttctgtggatcataggtgcattctttttttttttcggtttttcacaaattatccaactgttgaataaaattataaatatgttaataccagctttttccaataaaataacaaatgttacttc

SEQ ID NO: 1346 - DNA, 353 bp, Mus musculus
tttttttttttttttttagatgtaacatttgttattttattggaaaaagctggtattaacatatttataattttattcaacagttggataatttgtgagacaccgaagaaaaaaaagaatgcacctatgagccacagaaccccaagtgactgggcctgactatgttaccagcacgtagatacccaacaccctccaagggcgtcaccctcagagaagaatcaaagcagaagaaaacaaactcaaaaccccaacaatgtcgtaatgataatgggaaatgccacgtactcaagaccagagaacttaagcagagtaaagtggcaaagtctgtggcttgcaaggctctggtccttctg

SEQ ID NO: 1347 - DNA, 660 bp, Mus musculus
ccttacacactggcctggatctctggcacacccatctgcttttgcggtttggcgttagaaaagattcgccttggaggttggaggctgctatgaggtcataggtttcacacataatgtcttcaaagtcaaatcttacacggtcttcaaaaggaggggtcttgcacatggccctagtttccagacttctgtttgaaatgtcgggtatcaaagtagaaaggaaaaagagagacagaaaaagatctcagaagaaaaaaaaataagtctttgggacccgaagaaatcacccaggttcagagcggactgctaataataatgtgtgtattgatcgaggaaaaagtgcggaggggggaggggcggtgtgaaaaatggcagaaggaccagagccttgcaagccacagactttgccactttactctgcttaagttctctggtcttgagtacgtggcatttcccataatcattacgacattgttggggttttgagtttgttttcttctgctttgattcttctctgagggtgacgcccttggagggtgttgggtatctacgtgctggtaacatagtcaggcccagtcacttggggttctgtggctcataggtgcattcttttttttcttcggtgtctcacaaattatccaactgttgaataaaattataaat

SEQ ID NO: 1348 - DNA, 372 bp, Mus musculus
ttttttttttttttcttctgagatctttttctgtctctctttttcctttctactttgatacccgacatttcaaacagaagtctggaaactagggccatgtgcaagacccctccttttgaagaccgtgtaagatttgactttgaagacattatgtgtgaaacctatgacctcatagcagcctccagcctccaaggcgaatcttctctaacgccaaaccgcaaaggcagatgggtgtgccagagatccaggccagtgtgtaaggccctctcaccaggattttggcttcaatgggattaaatacgactggccacattcttcaacttctttacaagaggggaaagtcgccgatcttttaattgctagcttgaatca

SEQ ID NO: 1349 - DNA, 1884 bp, Mus musculus
gcgatgggtccggggcgggcggcagggcggtctgggagatctcctccccccaccacattgagagatctcagtgagtcaccgagtggttctgcatattaatgagctcgctctccgagagggcaggagcgaatttaaaagaggccagggtgggcggagggaagctgtggggagatcgcagcacccagcgccaagcgcagccggcaccgcgacagacggcaagagcacccatcgacgggcgtattggagcgagccgagcagagcagagagaggcgtgcttgaaaccgagaaccaagccgggcggcatcccccggccgccgcacgcacaggccggcgccctccttgcctccctgctccccaccgcgcccctccggccagcatgaggctcctggcggccgcgctgctcctgctgctcctggcgctgtgcgttcgcgcgttggacgggtccaagtgtaagtgttccaggaaggggcccaagatccgctacagcgacgtgaagaagctggaaatgaagccaaagtacccacactgcgaggagaagatggttatcgtcaccaccaagagcatgtccaggtaccggggccaggagcactgcctgcaccctaagctgcagagcaccaaacgcttcatcaagtggtacaatgcctggaacgagaagcgcagggtctacgaagaatagggtggacgatcatggaaagaaaaactccaggccagttgagagacttcagcagaggactttgcagattaaaataaaagccctttctttctcacaagcataagacaaattatatattgctatgaagctcttcttaccagggtcagtttttacattttatagctgtgtgtgaaaggcttccagatgtgagatccagctcgcctgcgcaccagacttcattacaagtggctttttgctgggcggttggcggggggcggggggacctcaagcctttcctttttaaaataaggggttttgtatttgtccatatgtcaccacacatctgagctttgtgagcgcctgggaggaacagtgagcatggttgagaccgttcacagcactactgctccgctccaggcttacaaagcttccgctcagagagcctggcggctctgtgcagctgccacaggctctcctgggcttatgactggtcagagtttcagtgtgactccactgtggcccctgttgcagggcaattgggagcaggtccttctacatctgtgcctagaggaactcagtctacttaccagaaggagcttcatccccaccccacccccacccgcaccccagctcattcccctgtcacgaccaggcaagtgatccttaaaggagctgggtctttttcttgcaaactgagggtttctgaaaggtcggctgctttggtagaagatgcttctgaggcatccaaagtccccagcagtgtgagaaaatgattctcgatgttcgggaggacaagggaagatgcaggattagatgcaggacacacagccagagctacacatcctcttggcaatgggagctccccccccccaaagctttgtttctttccctcaccccaacagaaagtgcactccccctcagtgaatacgcaaacagcactgttctctgagttaggatgttaggacgatcctgcgccctgccctctcctgtgtacatattgccttcagtacccctcccccaccccatgccacacactgcccctcattagaggccgcactgtatggctgtgtatctgctatgtaaatgctgagacccctgagtgctgcatgcaggtttcatgttctttctaagatgaaaagagaaagtaataaaatatatttgaagttaccaaaaaaaaaaaaaaaaaaaaaaaaataaaaaaaaaaaaaaaaaaaaaaaaaaaaaaaaaaaaa

SEQ ID NO: 1350 - DNA, 480 bp, Mus musculus; identical to SEQ ID NO: 1202
  misc_feature (420)..(420): "n" = a, t, g, or c.
  misc_feature (448)..(448): "n" = a, t, g, or c.

SEQ ID NO: 1351 - DNA, 275 bp, Mus musculus
tccaactcacccctagaaacagtttgaggagcttagattcatgaaaatacctcattggtatgagatcttataaatattcatgtttttgaagccccctaatttctgtcttcttatttgttttttttgtgtggttttttaaaggaaattttggcacctgtttataacattttattactactctttattcaacatctcacaaatattcacctacattacaagctggaagtattttattcatatgtatatttataccaattaaataattttacaagtgt

SEQ ID NO: 1352 - DNA, 1176 bp, Mus musculus
atgacagaaccggagacactggccctgctggacatgaaggaacccgagactccagagaagagcccaccgcaggctttagtcctgcagtcagaggaagaaggtgggactgagtcccctggaactgagtcgctcagagtggggtcttcagtagggtctcctatagtcagagaggggcctgaggatggtccagacagcacaataagtgaggctgccactttaccctggggaactgacccccatcctagcgccccacttccggatcccccgggctggcgagatattgaaccagagcccctagagtcagaggcacctactaagtcggaggagccattcaaagaggatgccaacctgctccccgagaagacagttagggccttcgtgcccattgatctacagtgcatcgagcggaagccacaggaggagcgcatcctgcatcgcgacgctggaccaggcgagctcaggaatttcctgccagctcgactcagccaccctgagcccccagagcgcaagtgggctgaggccgtggtgagaccccctggccggtcctgcgggggctgtggaagctgtggaggtcgtgaggcactgagagctgtcgcctcggtggtggcggccctcatcttcttcccctgtctgctgtacggagcatacgccttcctgcctttcgatgccccgaggctgcccaccatgagctcccgcttggtttacacccttcgctgtggggtctttgccacctttcccatcgtactcgggctccttgtgtacgggctgagcctattgtgcttttctgcgcttcggcccttcggcgagccgaggcgggaagtggagatccaccggcagtacgtggcccagtctgtgcagctcttcatcctctacttctttaacctggctgtgctttccacctatctgccccaggacaccctcaagctgctcccgctgctcaccggtctctttgccatatctcggctgatatactggttgacctttgctgtgggccgctccttccgaggctttggctatggcctgactttcctgccactcttggccatgctggtgtggaacctctattacatgtttgtggtggagccagagcgcatgctcactgcctccgagagccgcttggactaccctgaccatgctcggtctgtttccgactacaggccccgctcatggggctga

SEQ ID NO: 1353 - DNA, 2286 bp, Mus musculus
gtttcagtcgctgcgacggaagcaggaacttggtcacgacaaaatctgcgggaccggtgcgggactgcggagatcccctgcgatcctccccagagccttgcgccgcttcgctggttctttgcaaaagcgacctaactgtccttgggcccaagcgccgcgggggccacaggggtctctcgcttgcagagaaaaagcaatctgtacaattttcctgaagtaaactgagaccagaagagccatccttggtctctgcagagagatcaagactaagcaacagttcagaatgctcttcaggggaaccagcttggcttactcgttgctggtcatttccttcctgacaccaaggtcgtctgctggtcagaactgcctcaccaagagtctagaagacgttgtcattgacatccaatcgtcgctttcaaaaggcattcgaggcaatgagcccatacacttggcaactcaggaagactgtatcggtgcctgctgttcaacaaaagacatagcaggggacaaggcatgtaatttgatgatctttgacacccggaagacagacagacagcccaactgctacctgtttttctgtcccagcgaggatgcctgtccgctgaagccagccaagggccttgtgacctacaggctcatcagagattttccgctgaccagcgctaattcatcactccaacagttaacacaaggagagtttctcttacttgaccattcgtcaccaggagccacccctgggtttcgtaccccagcaggttacccaaagcccaccggcctgtcttggagtgacagatcttctctgaagtccacagcccccctgcacttgcgcaaacacatcaaggctgatgaaacaagcatgcagctccctgaagaaaaaagccattctcagagtttacagcttccctcagaactaaaaatggctcatctgctccctaaaactgtgccgactccacctaccactgtagctgtggctcccctccgtaacgtctctgccaccctgaagcctgagcttctgttgaccagcatttcagtgacagctaagactttgaagcagaaggaggccaccacagcatcacctgtcaccaccgtgacctcgaagctcccaggagtcccagggtctacaagttttacacccgtggttacacatcaggcagctttgactaacacctttcaggcacatacagactccaaaggcatcttagaaacaatgccctttcaaggaggctctacgctgacttcagacccgaggcacgggaaaagctcaacctcagagtcttccattacaaacaagactgcttcctgggaggacaggagggtcagtgtaggcagcgcatcgctgaacaagggtccaaaaagccagcatggcctttcatttgagaagtggcttctcattgggaccctcctttgtggtgttttgtttctggtaataggtctcgtcctcttgggtaggatgctggttgaagccctccgtaggaaacggtattcaagacttgactacttgatcaacgggatctatgttgacatctaaagacaagttcggtatctcttagttcatgtaagaactcattgccaatcgcacctgtgtcccttctgcccagccggtctcagcaggaactgtatcttgaagaatagccctacttccctccccctccccctccccctcctctccctcctctccctcctcttccttttccttttcgaaataggctcaggtagcccaggctggttttgaactcctgatcttcctgcctctgcctcctgagttcagggattgcagattttcactaccatgtctggatttttaattaaaaaaattttttttaattttttttttcccaatactacatacaggtcagggtcctctgcatgctaggcaagccatctccttctgagccatccctcagtccaaccactttctgtttgtctgtttggcttttttttttaaagaggaagagaagaagggttaaaagaaactaagttaagttactgagtgatctgtctgtaacatagtagctgaaaataattcctaactagaatgttaagtatacttaaatataaactagaaacgtagtatctggctttagatcaagacagcttgttggtttaggacatctgagctctgattcattactattccccattccagataatggcaactgtttgatacgagttttaatgggtcctcttttatttttatttttttattttatatgaattccaataaaattcattccagatgtatcttcctccaattaaatatttgaataaatctcttgttctggcggc

SEQ ID NO: 1354 - DNA, 453 bp, Mus musculus
tttttttttttttttttaacaaaaacagaaaaaaaaaaacacttttattttccacaaggaagagcaataggaaaagttaaatcatttcccacatggttttcttaaaacagagcctacaaggacatattcagcaccaaataaaagattacaacagccatagaatataatctataaagcaaacatttaatattgcactttgtttctcaaacattttggatttgacttttcctaaatgaaaaattaggaagctatcttgaatactagagcatgactgtggccctcaggtgttatgtcaagaattgaccaatatttagaagtataatgcctctaaagagtacagaaataattaatgggaaaagtaaaaccttattttgccaaatcgtaaaagaattttgtcaccagtgccaattaatcagaatattggtcattcttgctaatagagtactttgtcga

SEQ ID NO: 1355 - DNA, 697 bp, Mus musculus
gctatttgtagtaagactcaaccccagaccacaggaccggttctgcccaacccttttgaactacttggtcttttgagacctcgcatcgaagatggctcaggcaccaacagttatcgtgactcaacctggattcgttcgtgctccccaaaattccaactggcagaccagcctgtgtgattgcttcagtgactgcggagtctgcctctgtgggaccttttgtttcacttgtcttggatgtcaagtggcagctgacatgaatgagtgttgtctgtgtggaacaacggtggccatgaggactctctaccgaacccgatacggcattcctggatctatttgtgatgactacatggtcacactcttctgtcctgtttgctctgtgtgccaactcaagagagacattaacaggaggagagccatgaacgctttctaaggagctggatggcaagagctctggctgaagaagctcaactcagcacacactccttcagcctgagatttttcaaatctttggcaactgagatgggatggatccatttaattagagaacggtgaaatctttctagttgggctttttgatttattttaaatggatattgctctttgacttggtttcttcttgctcccatatcatcaaatattggagcctataatttttttaccttacattttaggtagaaaccaaataaaagattttgct

SEQ ID NO: 1356 - DNA, 315 bp, Mus musculus
tttttttttttttttttgtgggttcctttgcatactacatgcaattctttaaccaatgtctggctaatgtaattaaagttgttaatttatatgagtgcatttcaactatgtcaatggtttcttaatatttattttgtacaagtgctggtaattttttatttacgatatgtttaaagagataacggctgggtatgttttcatgtgtttatagcagaaattatttacttctattccattccaacggatattctgatgtttgcgaggcatgcaatcaatactttgttcagttagtaggcagtattcagcctcgtgccg

SEQ ID NO: 1357 - DNA, 2493 bp, Mus musculus
ttcccgcgcttctgctccgccctccgcagccctccacagtcaccccggagaccagccgtgttaagctctctgctctgaagctgactgacttccatggcagccgcgaagaaagcagttctggggccattggtgggagcagtggaccagggtaccagctcgacacgttttttggttttcaattcaaaaacagctgaacttcttagtcatcatcaagtagaaataaaacaggaattcccaagagaaggatgggtagaacaagacccgaaggaaattctgcagtctgtttatgagtgtatagagaaaacgtgtgagaaacttggacagctcaatattgatatttccaacatcaaagccattggtgtcagcaaccagagggaaaccacagtagtctgggacaaggtcaccggagagcctctctataatgccgtggtgtggcttgacctaagaacccagtctactgttgagaaccttagtaaaagaattccaggaaataataactttgtcaagtccaagacaggccttccacttagcacgtatttcagtgcagtgaaacttcgttggctccttgacaacgtgaaaaaggtccaagaggctgttgaagaaaatagagctctttttgggaccattgattcatggcttatttggagtttaacaggaggaatccatgggggtgtccactgtacagatgtaacaaatgcaagcaggacgatgctttttaacattcattctttggaatgggataaagagctctgcgaattttttggaattccaatggaaattcttcccaacgttcggagttcttctgagatctatggcctaatgaaagctggggccttggaaggtgtaccaatatctgggtgtttgggggaccagtctgctgctttggtgggacaaatgtgcttccaggatggacaggccaaaaacacgtatggaacagggtgcttcttattgtgcaacacgggccataagtgtgtattttctgaacatggcctcctgacaaccgtagcatataaacttggcagagacaaacctgtgtattatgcgttggaaggttccgtggctatagctggtgctgtaatccgctggctaagagacaaccttggaattattaagtcctctgaggaaattgaaaaacttgctaaggaagtaggtacttcttatggctgctacttcgttccagcattttcagggttatatgcgccttattgggagcccagtgcaagagggatcatctgtggactcactcagttcaccaataaatgtcatatcgcttttgctgcactagaagctgtttgtttccaaacccgagagattttggatgccatgaatcgcgactgtggaattccactcagtcatttacaggtagatggaggaatgaccagcaataaaattcttatgcagctacaagcagacattctgtatattccagtagtgaaaccctccatgcctgaaacaactgcactaggcgctgccatggcagctggggctgcagagggggttggtgtgtggagtcttgaacctgaggatttgtcagctgtcacaatggagcggtttgaacctcagatcaatgctgaagaaagcgaaatccgttactccacatggaagaaagctgtgatgaagtcaattggttgggttacaactcagtctccagaaagtggtatcccataaataataccacctcacggatttccaagatgcaagctttttaatgtgatatgaaaatctgactattctgtctcatagtataatgatgctattcatagactctgatttttttcataagccactggctgcatgatcctctaagcagacctatgacttgaaataaagaaagtgcagcagaaagaatcctccagaaacatttaatttttttttaacattgacagttaagatcgggtcagtcacctttgaggctgacctctgcctccactgtcatgatgtcctacactattcccgttaaggtctagggtgattttggtatcctgtctattgaaatgtgccattcagtatattcagatgctagtggattacacatgtttgaggaagaggttgttactaacctgttcaaaatgagtggcttcttgcttgtttgcttttaacagctcagatgtcttcttttctatatattagaaggccacaacattactggatatttcaaatggaaacatctaaagaattgttggataattgaatttgctaattcttgtggcttaagacatttttctgtacagttgtttgcccaaaattccaaccttgtcaggtgttttacactgtcccactaactaccatagctttctgtctggctcttacaggatagaacactttctttttctgcttttttttcatttctcctttttatatttttattctgtatgtataacatacatgcctatatattttatatgctgagagtaacccatttataaattaagagcacattatattcaataagttataagagggctggtcttaagtggactactatgtatacag

SEQ ID NO: 1358 - DNA, 264 bp, Mus musculus; identical to SEQ ID NO: 1222

SEQ ID NO: 1359 - DNA, 1113 bp, Mus musculus; identical to SEQ ID NO: 1332

SEQ ID NO: 1360 - DNA, 1622 bp, Mus musculus
tactggagggggctgcacgggcgacttggcggcgatggctcgagctccggcggcgacgacggtggccggaggcggcggctcctcctcctcctcctcctgggcttgggcccggcggtgatccgagctggcggccgcggccccccgatgagactgttggcgggctggctgtgcctgagcctggcgtccgtgtggctggcgcggaggatgtggacgctgcggagcccgctctcccgctccctgtacgtgaacatgactagcggccccggcgggccagcggcggccgcgggcggcgggaaggacacgcaccagtggtatgtgtgcaacagagagaaattatgcgaatcacttcagtctgtctttgttcagagttatcttgaccaaggaacacagatcttcttaaacaacagcattgagaaatctggctggctatttatccaactctatcattcttttgtatcatctgtttttagcctgtttatgtctagaacatctattaacgggttgctaggaagaggctccatgtttgtgttctcaccagatcagtttcagagactgcttagaattaatccggactggaaaaccctagacttcttgatttaggtgctggagatggagaagtcacgaaaatcatgagccctcattctgaagaaatttacgccactgagctttctgaaacaatgatctggcagctccagaggaagaaatacagagtgcttggtataaatgaatggcagaatacagggttccagtatgatgtcatcagctgcttaaatttgctggatcgctgtgatcagcccctgacattgttaaaagatatcagaagtgtcttggagcccacccaaggcagggtcatcctggcattggttttgccctttcatccctatgtagaaaacgtaggtggcaagtgggagaaaccatcagaaattctggaaatcgagggacagaattgggaagagcaagtgaatagcctgcctgaggtgttcagaaaagccggctttgtcgtcgaagctttcactagactgccatacctgtgtgaaggcgacatgtacaatgactactatgttctggacgatgctgtctttgttctcagaccagtataaacacgtggaggcccaagtcctcagagtcacccctgcaaccgaccctccagaagaggagatgcatccagtgatgtgagggggacctctggggactgcattctcagtatcatgtaggaatttaaaaagccaaaatactaattctttctttgtagtgtgtaagggagtgtttttaaaaacaaaacccaactctttgtgtatttttaatcaactctttactcagaatcaccgtccaatgcaggtcactctccaattatgatggaagatattttttatacttaattgctgtagaggactcattcccagacaaagcaatagtcatgatgtcatggaaccgatcaatggattgtttttaataaatgaagactggctataaagctgtccattcaattccaaatattggttataaagtagaaccattgataactttcatgtttagaaactccttctcttactattcaaaaaatgtactttaatcatgctaataaacgtttttggagataaaaaaaaaaaaaaaaggccaca

SEQ ID NO: 1361 - DNA, 1661 bp, Mus musculus
tgaacctggagatcgaccccaatgctcagtgtgtgaagcatgaggagaaggagcagatcgagtgtctcaacagcaagttcgcagccttcatcgacaaggtgcgcttcctggagcagcagaacaagctgctggagaccaagtggcagttctaccagaaccgcaagtgctgtgagagcaacatggagcctctgttcgagggctacatcgaggcgctgaggggggaagctgagtgtgtggaggccgacagcgggaggtggctgctgagctcgaccatgcacaggagtccatggagggctacaagaagagatacgaggaggaagtttctctgagagccacggccgagaatgagtttgtggctctgaagaaggatgtggactgtgcctacctgcgcaagtcagatctggaggccaacgcagaggcactgacccaggagaccgacttcctgaggagaatgtatgacgaggagacccgcatcctccattcccacatctcagacacctccatcgtcgtcaagatggacaacagccgggacctgaacatggactgtgtcgtggctgagatcaaggctcagtatgatgacattgccagccgcagccgtgctgaggctgagtcctggtaccgcaccaagtgtgaggagataaaggccacagtgatccggcatggagagactctgcgccgcaccagagaggagatcaatgagctgaacagaatgatccagaggctgactgctgagatcgagaatgccaagtgcaagctggcagggctggaggaggcttgcagaaggccaacaggacatggcctgctgctcaagcagtaccaagaggtgatgaactgcaagctggggctggacatcgagatcgccacctacaggcgcctgctggagggcgaggagcacaggttgtgtgaaggcatcgggcctgtgaatatctctgtcagcagctccaaaggtgccgtatctacgagccctgtgtggatggcacgcccatgctgaggaccgaatactgcaccgggaccacgggtgtcctgaggaacagtgggggctgcagcgtggtgggcaccggtgaactctacatccccttggccccaagggctcctgggctgtggaaatgggcggagctccagcatgaaggtgggggtgggtagcaattcgtgcagccgctagtgttagcgctactcagattctgaaattgctgaataccacatctctatggggctgaagaccagaatattccaaaactcttcccttcccacaccaactacacattgccctgggatactcctgggagctgagctactcccagccccgctcatttcttcaaagccacccttcgcatatctagatgcagaccccaagctggacacagagtatttggagacacagagaagggggttttattgtctctgtcacctggggtagcaagtcaactttaagacagtcaagagaatggctatagtcttaccaccacttctctccaggaggggtggccagctgtacacacaactgttctgttttgcaaaaggctccatttcactttcctcacaaagccagcccttgtcctttctaccccatctcctttccctctggctctcaaatagctaagaaaattgaactcataggacccacctgaagcatgcagtattataaaaaaaaaaaaaaaaaa

SEQ ID NO: 1362 - DNA, 1374 bp, Mus musculus
gagctcggggctgaatggccgaccccgacgcggcgcgtgtggaggaggtggctgtccggctccccgagcccaggcgacccgccctcctccggctcgtgaggggagcggctaccccgccggcctgagctctctccctggccgccgcggctccttcccggggacaatatgttcaagagaatggcggaatttggacctgactccggcgggagagtgaagggggttaccatcgttaagccaatcgtttatggcaatgttgccaggtactttggaaagaagagagaagaagacgggcacactcaccagtggactgtgtacgtgaagccctacagaaacgaggatatgtcagcatatgtgaagaagatccagtttaaattacacgaaagctacggcaatcctctaagagtcgtcaccaagcctccatatgaaatcacagaaacaggatggggtgaatttgaaatcatcatcaagatatttttcattgaccccaacgagagacctgtgactctgtaccacttactgaagctcttccagtctgacaccaatgccatgctggggaagaaaacagtggtttcagagttctatgacgaaatgatatttcaagacccaacggcaatgatgcagcagctgcttacgacgtctcgccagctgacattgggagcctataagcacgaaacagagtttgcagaacttgaagtgaaaaccagagaaaaattagaagctgccaagaaaaaaacaagctttgagattgcggagcttaaggagagattaaaagcaagtcgtgaaactataaactgtttaaaaaatgaaatcaggaagcttgaagaagacgatcagacgaaagacatttgagcaactggcggtaagtcggctgcagagccggggcgccgcggagggacttgccacagacgctgcggtgtttctgggaggagctgcgagcgcggtccccagccggccgtggctttctcagagaggactccgggtacccacactgtcaggctgcctcccggggcacatgtgtgctctaagactcgatgctgggtagcattccacgacgttaagcacaacttttaaagtgtttgttttgttttaaattgaactctatgtgtagtttatcctcctcaggcaggcgtagcggttgtgttgtaaagtctaacgtgtgcgggttttgtacctctctcctaggtaggattagtgactggtatgtgtgtttagttcttcaggtccacatctgcccgggtctacctcttttgtatatgatgtatctaggaagtgtttaataaatgtagtttactgctcctgtgtctgcctcttgtgacttctccaatcactttaccgccttgtgtttgcaaataaatgttattctttgagaattct

SEQ ID NO: 1363 - DNA, 2860 bp, Mus musculus; identical to SEQ ID NO: 1304

SEQ ID NO: 1364 - DNA, 3512 bp, Mus musculus
ttcttccaagggtttcctggccagcagtctgtgccagggaccctgaacttcgctgtaagcccccaaaagccacgctctacatccgaggctgaatcagagacctccatgtctgaggcgtcctctgaggacctgatgccatccccggaggctcccgatggggaggaggagtctgcgaagaagaaggagaagaagtccaaaggactggccaacatgttcagtgtcttcaccaaagggaaaaagaaaaaaaaggaccagcccagattatcagatctggaagtgcagcccaagcccaggcccgagttagatggtccactgcccacagtggaggagctcaaggaggccctggagcacgggcggctggaggtggcctggcaggtgctggcgttggagaggcagctcgaggctgcggcagcggcgggtggcatgagcaacgaggagctggtgtggcggcagagcaaggtggaggctctgtacgtgctgctttgcgaccaggtgctcggggtactgcggcggccgctggaggcggcgcccgagcggctgagccaggcgctagccgtggtgtcgcaggaggagctcgaggaccggcgggcgtccgggggacccttggcggcggcactggaggccacgcgcccgcggcgatggctgcagcggtggaggggcgtcgtggcggaggtggcagcggaacgtctggacgcgcagccggccacagcgcccgagggccgctcggaggcggagagcaggttcctgcacatgggtcgcaccatgaaggaggacctggaggtggtggtggagaggctgaagccgctgttccccgacgagttcaacgtcgtgcgcacctacgccgaaagctaccactaccacttcgccagccacctgtgcgccttggcgcagttcgagttgtgtgaaagggatacctacttgctgctgctctgggtgcagaacctctaccccaatgatattctcaacagcccgaagttggcacaggagcttcaaggtgtcgggcttgggagcctcctgcccccaaagcagatcagattgctggaggccatgttcttgtccaatgaggtgaccagcgtgaagcagctcatggcccgagctttagagctggagtctcagcgctggacccaggatgtggctccccagagcctggatggccactgtcacagtgagctggccatcgacattctccagatcatttcacaaggccagactaaggctgagaacatcacttcggacgtggggatgcagataaagcagttgctgctggtggagctggctgcactactgaggagctaccagcgcgcctttgatgagtttctagagaagagcaaactcctgaggaattacagagtcaacatcatggccaacatcaacaactgcctgttcttctggacttccgtggagcagaaatggcagatatctcatgattctctgaaccgcctgctggagcctttgaaagacctcaaggcccatggcttcgacaccctgctccagagcctatttttggacctgaagccgctgtttaagaagttcacacagacccgttgggcaaatccagttgagaccctggaggaaatcatcactactgtgagcagcagcctgcctgaattctcagagctgcaggactgtttccgggaggagctcatggagactgtgcacctgcacctagtgaaagaatacatcatcaggctctgcaaacggcgcctggtcctcaagacggccgagcagcagcagcagctggcaaggcacatcctggccaacgcggatgccattcaggggttctgcactgagaatggctccactgcaacctggctgcaccgcgccctccctatgattgctgagatcattcgcctgcaagattccagtgccattaagatcgaggtggccacatacgccacttggtaccctgacttcagcaaaggccacctgaacgccatcctggccatcaagggcaatctaccaagcagtgaagtcaggagcatccggaacatactggacatcaacacgggagtgcaggagcctcccaggcccctgttctcccttataaaggttacttagcttttctgaaggtctgatatgctaatgaggcccagggaacaccaggcaccacaccagttggggatgctcagtggctccagctccatgacccatcatcaggctcccacattctgctgttgcttctgcccagccctggctctggaacaagatctgacagccaagatcgcacagatgatggatccagtggggtccagacctcactgaagggagctgacatctgagcatgcaagagatttcttgtaaatgattattcatcttgggtagagtgacctttgtctacctacactgtagtctgccttttaacggtctgagttgccctgtccagctccctaggatcaggggtgaagcctcatttataccatttccttcagcccagggatgtcatgagatagaactaaaaacaagggaagaaagaagaactagtatctgacccggggcctggaagcaggcctgtgaagtgcccatgacagagctagaccctgcaaagtgtcccctggtaccactcagctagcaggaccctcttattcactccccatgggctgccctgcccctctgtgtgtgtatggatgtgtttgggaagtgaccctggaagccttcgcagagcagggacctcccgggttctctcagatcaaatcttcttgcatttaggaataagccagaggccaccgtctggagtctggtgggagtgcaggggtctggcaagtgctttactggcttcctgttggtgctgtgccaaacttccacggcaagtgggcttgaactaccacttttccttcagttctgcaaatcacaagtctattatcagactgaagtctaaatgtggtcagggcccactgcctctggaagccccagggagaattgtttcctggtcttccccagtctttagaggttacccccatcttttgtctgaggaccttgtaccttcagagccagggacagctacatatgctcctcacaccaccacagtctccactggttcggatcccactgtgacttaggatccccgtgactgcagtgaatctgcccagagactcagcagccaccccattaactaactcctgtcacccaatagtcattggctctggggaccagtgggtcccacgggggctacactggaaaacagcaaggcagtttgccatcaaggcacctgctactccacagatcctgctcctctctagccatgagagctcttctcggcactggcccagccttgacttgtcatgattcgaggctgggatttgaagcttctcctctgtcccctcccccaggtacttgctggagctggccagggtgagcagcacacacagcctttgtattcttgtagacgaccgctgttgatgacattaatattgttaatattatttttatagtgttggttttgtatgtgtgtactcaggacagaatccagagatttcttttttatatagcttgatataaaacagatttcaaaagtg

SEQ ID NO: 1365 - DNA, 548 bp, Mus musculus
  misc_feature (348)..(348): "n" = a, t, g, or c.
  misc_feature (408)..(408): "n" = a, t, g, or c.
  misc_feature (425)..(425): "n" = a, t, g, or c.
  misc_feature (462)..(462): "n" = a, t, g, or c.
  misc_feature (472)..(472): "n" = a, t, g, or c.
  misc_feature (477)..(477): "n" = a, t, g, or c.
  misc_feature (484)..(484): "n" = a, t, g, or c.
  misc_feature (497)..(497): "n" = a, t, g, or c.
  misc_feature (532)..(532): "n" = a, t, g, or c.
gagaaatggaaggttttatttgcagactgtatagctcaccttctaagctatgaccttggggaaagggacggtccctgccccttcctccttcaggctcctacctgcagctcctcccctccctttgctgggcctgaactctcacttcctgcccctctgctagcccagccagtttggccagtgcctggggaaccctgagacccagttcttcccagggagcagtcctgtcctccctggccttggggctcgagggcagcccaggtgtcggccttctccacagctgtccacccttctcccttcctgtcttcctccttccaggcccaggcctctaatctgcctcctgtccaccantcgcctcatttctgttttccctctcaatctctaatggccctcttctttataccccatctnaaaagtcttccaaattnaggctgaccaatccgccagcctggaagatggccccantgtttccccntgatnctcgcantgtgctaggaganggggatgaccccaaggggctgcatttaagccaaantgactgttggcccaag

SEQ ID NO: 1366 - DNA, 1250 bp, Mus musculus; identical to SEQ ID NO: 1045

SEQ ID NO: 1367 - DNA, 492 bp, Mus musculus
acaatggcacattattttgaagacaaacgggattcttccaggtgtagtgagcagatgggaatgggaccgaatggcacgcaaggttaagtgttcccaggatcagtctgagtgctggctactttactgagctctgactggaaacacatctttcaatgtgctcccgtcaacagtgaggatgcctgacgctgggcctctgctttctttcccttgctttatatggtgagtgatttcatgtcttttttccctccagattaagaaaaagaatatcacagcatcagttttttttcttttcctccttgatgggttgaacaactcatatttccaaatgattccatgaccttgtgacctaatgctccctctctcggtggtacaggaacatcaggtcacgcctgacttccaatattaacaacagcaaaacagcaggggggggtaatagggagaacttttgcatttctgaagctaatttttaaaacaggtcacacaagttttttg

SEQ ID NO: 1368 - DNA, 453 bp, Mus musculus
  misc_feature (25)..(25): "n" = a, t, g, or c.
  misc_feature (33)..(33): "n" = a, t, g, or c.
tttttttttccttccttgatgggtntgaacaanctcatattggccaaatgtattccatgcaccttgtgcacctaatcgctccctctctgcgggggtacagggaacatcaggtcaccgcctgacttccaatattaacaacagcaaaacagcaggggggggtaatagggagaacttttgcatttctgaagctaatttttaaaacaggtcacacaagttttttgggtgtccccttcttagaaatcacgataagtgatactcagtagtaagttacccatccaaagccacactacaacttctagcaaaaaatccactgaattaagcaccataagaccaacttcaacgccacaaatactccagttgcacaaactactaaacatcacaaagaacttatggaaaagattcaagttaaccaattgtctaaaatatatgaataaaaccaatttagtcattata

SEQ ID NO: 1369 - DNA, 3925 bp, Mus musculus
taccaacaccgcacgaagtgtgtacagattcccagttagacagcaggagggacctgggagcggccagggggatgttttatctctaagagaccaagagctcaggcagggcttctgtgccctgcttcctccctggcttgagctggatcctggaccagctgctgacctcctgttcactctggcactgccctcacgtctccgtcatgacccatctgctcacagtgttcctggtggccctgatgggcctgcctgtggcccaggctctggagtgccacgtgtgtgcctacaatggagacaactgcttcaaacccatgcgctgcccagccatggccacctactgtatgaccacacgaacttacttcaccccataccggatgaaggtgaggaagtcctgtgtccccagctgctttgaaaccgtgtacgatggctattccaagcatgcatctgccacctcctgttgccagtactacctctgcaacggtgctggctttgctaccccggtgaccttggccctggtcccagcactcctagctaccttctggagcttgctgtaaagctcggttccccaagccagatccactcaaacgcaacactctcaaaaaacacagtttccctctctctcccaattcactccacccaacgctcttccttctgacactcctcaactaccacgaggtcccatggctacctacgaaagaactgatggcatccagatacctcactccaaggtcattttcagaaggctgacatgtggacctgtaatgtgcccacccatgggtggggcaggctgggcttctcctctacccaagatcaggggcatctgggagaatgtttatggaggaggggtcatcactcaagtcaaggagcactgatttgatagaattagtagccaaactccaccttcagaaccctgcctcagtctacccagtagaggatgggtctgctagaggtgaggggaggagagcggcggagaataacgagctggctagaagcagagaaagactcagcagggctgtctccgaagatcagcgcggcttgccagagcaaatgtgatgtggaagccatgtgaggaagccctttgtcatttccacttatctgaggaactctgccagacctgatgttgggatagccattggccaagggttcctagcaacggcgtcatttccataggccactgaaatccctccagccccagctcagcaggccccttgacctccactacagtccttcattcacacaccagctgctgggccttgaagttggcagggacttgggagcaggtgacccatgctattttttgtctggcctgttattctgggcatggcaagaagggatcagacgcaggtcagagcagggcagtagggcgactgagacagggaaacagacttcagccagtggcttcccaggtcccgtaggcagctcctacatccttcagtctcttgttacattcccgggagacaaatatacagggagccaagccgagtgctaggtgatgactgcctgtgaagtctattgtggccacagactgctgggtaccaagtctcaggagaacccagcctagatttaggagacacagatctgcctttcatgcagtgtagctgtccttgggagccttaccatgctctctaactagttcctcaactcacatgtcactgaggaaccccctaacactggcccagcccaggggtcgggatgctggccaatgtccatggagtgggactacccctggagagtccttgggtcatcacatcacaaatgttttattccaacctcccagtggtgagagctcgggacacaaaggtccatcctggggaccttcttcctggttctaggcagacctgaactctgtctgctgctagagctgatgtggttttccgcctcagtttcctcctccggggataggccaccggaggatttgggagggtggggagggcatcctgctgatgggctcgccgaggttctcaggaacaggaacgggcggggctttagtacacaggtgagttgggtgggaactggcccggagctgaggagacactgactgggcagagggaagatgagtctcaagggagggcaggaaaagggagggggagcgcgcatgcacatgtgcactcagtgcaggctacagagcccaaaaggcagcactggctgtggtgtcccctgaggcccaggcaagatgctaggaggaagccaatgctgcccccacctgagctcacatggaacatgcacaccaccagcagcagcagcaagcattgagactgacctgtggacgccatagggcactggcaaggagggtcagaggcgggtccctgactcagtgggtgaggcccgggaaacattatcctgttaccctgcgtgtgcaagatcattgtccccagctagatggcgtcctcaaccaaaactgagaggagccccagttcaggtcctccctcctaccacaagggggtggtgtggaggaggcttgattgcccttggagaagcaccggtactgcagagctgggggccagcttctttcatctgtgtctagacaccgaccagataggccccacagtggcaacactgccacacagtcctacaagaagccctgtgcctagctagcacagagccccaaaaggtgctcaattaatacagggccaagcctgccagtgggggggatgcagattaggggaacagacccagatggcctgtcctgaaccctgtctggggtggtgtgatgagcatctgtctagcccactgcaggtggctctacacactccacaacagttctgcaaaagtgtatgaggtggtcattactgcgcccctctcacaggtaaaggcactgaggcacggaggagtgaggcacttcattttcctgggccattcaactttccaggaccaacacattcaactatgggtactactccaatagctggggttctttgaggctgggccccctgaagatgatagtggcttcatcaaccagagaatttcagagtgcagtgttgtaggagcctatgaacctgaaatgtcagaactggaggtttgaggggctgaggggtaggccaggggtgtctggccccttgtgtggagacagagagagagggaacatgggatggggtagtagagagaagtgcaaaggagcgtcagcctttctcagggctaatgctgtcagggacgagggctcaagcctgtgagtgttctcacactgtgataaacagtggcccctcaacacagacggtgtccagagtggccggcagtggttatctagagttgcaatctggaagcctcttggtagtcactggagagaggccgcttgatgggacagcaccaaatgtgtgtgcttctgtgggatgtgaggaagctgggtcagcgcatgaagccaaagcgtccttcagagcagaggggtggctggtctagtccaccagagacaagctatccagtgagagtcatactctgtcaccgtctctgtgattaccttaccccaaagcagacggggacgggatgcagagcacccgtgtcttcatcttctgcggcaagcacgtgagttcacattctgaaactctagaaagatttccaggagtggggtgtgcctttgctttggtgcatggttacttcctggcaagcaccgtggcatcccgcagcactgagtgacctgggctcctcaagccatctcattggtgaaatgacagtgccagtaccctctcagctggctcttggaggcctgtgcatggggtctgcacagaggaggcccccaaactatgcatggacggacacgtgatgcctagcacttcccttggttgtgtctctgccaaccccaggctctcacccagcaaggaaatgaaatccacttttatgacacatctccctcccccagccagctccattcacctatatgccagggtggtccctttcaatgtctgtcccccattggatgaataaacaagcgaaggac

SEQ ID NO: 1370 - DNA, 545 bp, Mus musculus; identical to SEQ ID NO: 1175

SEQ ID NO: 1371 - DNA, 3843 bp, Mus musculus
gaattccgggtatgaaacctcggtaaatgcagttgacgctgccgattgctgtgctcattaaattcattaagatgttgagtggagagattgctgagtggataaactcagggagatggcctcgtggacaaaatgttgctgcataagtgtggcgcctattgctggaatccccagttcccaggtctttcatagtactcaactgccataaagctttcattacttttggaaactgacccatctattcaacaaaagatgaaaatgccattgctggtcagccatctcctgctaatctccttaacatcttgtctaggagactttacctggcacagaagatatggtcatggagtgtctgaggaggacaaaggatttgggcccatttttgaagagcagccaatcaataccatttacccagaagagtcactggaaggaaaagtgtcactcaactgccgggcacgcgccagcccatttccagtttacaaatggagaatgaataacggggacgtggacctgacaaacgatcggtacagtatggtcggaggaaaccttgttatcaacaacccggacaaacagaaagacgctggggtgtactactgcctggcatccaacaactacggaatggtcaggagcacggaggcaactctgagcttcgggtatctcgacccctttcctcccgaggagcgtccggaagtgaaggtgaaggaagggaagggcatggtgcttctctgtgatcctccctaccacttcccagatgatcttagctaccgctggcttctgaatgaatttcctgtatttatcaccatggataagcgaagatttgtgtctcagaccaacggcaatctctacatcgcaaatgtcgagtcttctgacagaggcaactactcctgctttgtgtccagtccttctattacaaagagtgtgttcagcaagtttattcccctcattccgattcctgaacgaacaacaaagccatatcctgctgatattgtggtgcagttcaaggacatatacaccatgatgggccaaaatgtgactttagagtgtttcgctctagggaaccctgttcctgatatccggtggcggaaggtgctagaaccaatgcccagcactgctgagataagcacgtcaggggctgtcctcaagatcttcaacatccagctagaagatgaaggcctctacgagtgtgaggctgagaacatccggggaaaggacaagcaccaggcaagaatctatgttcaagcgtttcctgagtgggtagagcatatcaatgacactgaggtggacataggcagtgacctctactggccttgcatagccacagggaagcccattcctaccatcaggtggctgaaaaatggatactcgtatcacaaaggggaactgagactgtatgatgtgacttttgaaaatgccgggatgtaccagtgcatagcagaaaacgcgtatgggtccatttatgccaacgctgagctcaagatcctggctttagctccaacttttgaaatgaatcctatgaagaaaaagatcttggctgcgaaaggtggaagggttatcattgaatgtaaacccaaggccgcaccaaaacccaagttttcatggagcaaagggacggagtggctcgttaacagcagcagaatactcatatgggaagatggtagcttggaaatcaataatattacaagaaatgatggtggaatctatacatgctttgcagaaaataacagaggaaaagctaatagcactgggactctggtgatcacaaatcccacacgaattattttggccccaatcaatgctgacatcactgttggggaaaatgccaccatgcagtgtgctgcgtctttcgatcctgccttggacctcacgtttgtgtggtccttcaatggctacgtgattgactttaacaaggaaattacgcatatccattaccagaggaattttatgctcgacgccaatggggaactgctcatccgaaatgcgcagctgaaacacgcaggccggtacacgtgcacggcgcagacaatcgtggacaattcctcggcttccgctgaccttgtcgttcgaggccccccaggtcccccaggaggcctgagaatagaagacatcagagctacctctgtggcactgacttggagccgtggttccgacaatcacagccctatctctaaatacacgatccagaccaagacgattctctcagatgactggaaagatgcgaagacagatcccccaatcattgaaggaaacatggagtcagcaaaagcagtggatttgatcccttggatggagtatgaatttcgagtggtggcgaccaatactttagggacaggagagcccagcataccctcaaacaggatcaaaacagacggtgctgcaccaaatgtggctccctcagatgtaggcggtgggggcggaaccaacagagagctgacaataacgtgggcgcctttgtcgagagagtaccattacggtaacaattttggttacatagtggcgtttaagccatttgatggagaagagtggaagaaagtgactgtgactaacccagacactggccgctacgtccacaaagatgagaccatgaccccctccaccgcgtttcaagtcaaagtgaaagccttcaacaataaaggagatgggccctacagcctcgtagctgtcatcaactctgcacaagatgctcccagtgaagcccccacagaggtaggggtcaaagtgttatcatcctctgagatatctgtccattggaagcatgtgttagagaaaattgtggaaagctatcagattcggtactgggctgggcatgacaaagaagcagccgcacacagagttcaggtcaccagccaggagtactcagccagactggagaaccttcttcccgacacccagtacttcattgaagtgggagcctgcaacagtgccggatgcggaccttccagtgatgtgatcgagaccttcaccagaaaagcccctcctagccaaccaccaaggatcatcagttcggtgagatctggctcacgatatataatcacatgggatcacgttgtggcactatccaatgaatctactgtgacaggctacaagatactctatagaccggatggccaacatgacggcaagctgttctcaacccataaacactccatagaagtccccatccccagagacggagagtatgttgtcgaggttcgagcacacagcgacgggggagacggagtcgtgtctcaagtcaaaatttcaggcgtgtccacgctgtcttcgagtctcctcagcttgctcctgccctcccttggctttcttgtctactcggaattctgaatgttacgaccttggctgttttcatccctgctcagaggatgctcttcatcatgggatgactgtaattccttctaatccctgcggctccatcctaagccaaacaaattagactctaacaagctgttcaactgatttcccaacacatcacgactgaggcattcaggaaccccttcatccaaaagaataactttcaagtggaaataaagtgatttttaactcgttccaatatgccttataaaccatttaacctgattctgtgaaagttgcatgacttaaatcaatggacaagttacagtgttcaattcaatgccctaggctgtagagtgaaggtcaccatacacaggtgctttacatgtttgacaagttgtgaaatataatagagattgaaatgttgattgtatgtagtatgtgttcgagtaatgcagtctcttgtattagcctatatgtttgggttcctgcctatttttgaaagaccctcatcattgatgatattttgagttttccataaaattaaaacaaaaacccgaattc

SEQ ID NO: 1372 - DNA, 3755 bp, Mus musculus
agaaggcacgctcctacccggcagccgggtgtccccaaggagatctggggagccggggagcagctggggcttgtggctgctgggcacccaagctgacccgaccaggagactggaagctcgacacaggatggcctccccgagagctgtgcagctgtctctgagaaagccgactcacgctgtgtgcgtggtaggtgtggagacactggtgaacgtctatagtgatgtgcccaaaggtgccaagacctttggggtgtctgggagctctgaggtgaagatctacatggtctacgatccctcgagagtggcagagcccgcaggctgggcccactggcccctggatgccaacgtggacgtggtggtagtggcggacacagtcagtaaggacttatatgacttcaaggtgaaggtgtcgtactttgagtcacaggaggctgctgccctggcccacagtgtgctctacctaactgctgttgatgtgtcccttgatgtcgacacaggccgcacaggcaaggtgaagaaaggctctggtgacaagaaaacctggcgctggggccctgggggctccggggccatcctgttggtaaactgtgacagagatatccatgggtccagggaagacctgcatgctaaccatttgaagtcgctggaggacctgcaggacatgtccccaatggtgctgagttgtggtggccctgatgagctttttgagagccacaagctggtcttgaaggcatctttgtcagattccagaagactgaaggtcttctgtgcccggggtgggacatccctctccaactacaaacaggtgctagggccccgtcacagctcctatgaggtggaaaggcattctggggagagggccatccagttctacgtggaagggctcgccttccccgatgccagcttctcagggctgctctctctcagtgtcagcctggtggacacacggcccctctctgaggtgtcagtcttcaccgacagcgtgaccttccgggtggccccctggatcatgacccccaacactcagccgcccctggagctgtacgtgtgcagcgtgacagatatccacggccgcaatgacaagttcctggaggacatgtcccacctggccacgaaggccaactgcaaactagtggtctgtccccgggcagagaatcgcaacgatcgctggatccaggacgagttggagtttggctacattgacgcacctcacaaatccttccctgtggtctttgattccccccggaacagaggcttgagggacttcgcccttaagaggatcctgggtcctgactttggatatgtgacccgggagatcgagttcgcaggtgcctctggcctggattccttcggcaacctggatgtgagcccaccggtgagggtgggcaacacagactaccccctcggcagaatcctcattggtggcagcttccccaagcccagcgggcggcggatggccagagtggtgcgtgacttcctgcaggcccagcaggtgcagtctcctgtggaactctactccgactggctttccgtgggccacgtggatgagtttctgagcttcgtgcccacctctgaccaaaagggcttccgcctcctcctggccagccccagtgcctgcctccagctgttccaggagaagaaggaggagggctacggggaggctgagcagtttgatggcctcaagcataaggcaaaaagaagcatcaacgacatcttagctgacaagcacctcaggagggatagtgcgcatgtgcagaaatgcatcgactggaaccgcgaggtgctaaagcgggagctgggcctctccgagagcgacatcgtggacattccacagctcttcttcctgaagggagcctacgctgaagccttctttcctgacatggtcaacatggtggttctcggcaagtacctgggcatccctaagcccttcggcccgctcatcaatggtcgctgctgcctggaggagaaggtgcgctccctgctggagccgctgggtctgcgctgcgtctttatcgacgactttctcttttaccaccaactgctcggagagatccactgtggcaccaacgtgcggaggaaaccttttacctttaagtggtggaactccgtgccctgagcctgcccgaccaccacccttgcttcccagctgatgggagtcccagggcaagggcaagggccacgaaccagcctccaccctccttgggcctgaaagtgggctggctactgtggtcagctgagcgccaggaggacaacacttcttcgttcctggagtcgcctgccctgccctggagactatcgccacttttccttctcccattcccagctagagccctgagagggtcaaggccggaagttgagcctgttcaaggtgtggcctccgcagccacgccccactttgagctgtcccacccccaaccctccacctctctgaaacccgagaaaaatagctctggaacgaaatgcccaccttgccaggaccctggggcaagagcaccgtggtttcatatgactcctggattgcgtaagatgaaaaggaagatttggggcgtccttcttcccaaaggacctcaggccatggccctctggcaccgttcagttcaacagaggcaagcaagggcaggaaaactcagtccttgaaagcgagcaggcacaaaagcccctctaatgctcaactccatccagtccgacctctgcaggatgctcgttacctgccggagcagcctttaattatgagccctggtgcttcctgttggaagatgccgcgggccatagggagcccgtcgtaagtctgcaagcgtgggtgggggtgggcaggaaggttggaccaggaaagcagagagcttgcccatcttggggtggggaacctggaagcctgggactcgtggctgggtgtttagggcccctgaacctgaaggctgttggtccagatgtggagggggtggggcccaaggtattaggagagggtggggtaggccattaagttacatctggaggtgaggcctaatttcctctaatagtctctaattactcccgatcctgctgcaggcagtgggagggaagggcccacactcccctagcagccagggaccctacacaacatttgtactgccccagtaaaccccatggcaggcctgtgtcccccacccccacccccagtaggacagacagctggcctggaggctaatagcaccagctgaggtaacagaggcatgtggaggcaagcaggcaggcagacccagctgcagggcatggctggcagaggcctgccgtcttcctcctgtggtccaggagccaccacaggccactggattctgtcttggtatttttagtagtttctggtgccaccccagacttgaggcagctgctgtcacttcataaccggcggacactcagttagcgaaggcttccatgaaagtgttaggctaggcatggcctagtaggcattggctcttcccccttccagaaggttctgtggaactggaaccccatttgtaggctctctgcacgaacagcctcctctatgatcatggcccggctgcagctgagccacggagaaggagaagaagaagataaaggaggatgagaagggttggggcggtgcccgacctctgaagaggagaggagacaggcgaccatgggagcaagtcttcagcaccacatgatggggactctggagttgccgctcaggctgtctggggtcctggctgactggccaccgtctttctcatcaataaaaacatcgttgtgcattctta

SEQ ID NO: 1373 - DNA, 3068 bp, Mus musculus
gagtgctgggtttggtggccaaagcccccatcctaggccggcatgtctctacagaggattgtacgtgtatctctggaacacccaaccagcgctgtgtgtgtggcaggggttgagaccatcgtggacatttatgggtcggttcctgagggcacagacatgtttgaggtctatgggacaccgggagtggacatctacctgtctcccagcatggagaggaaccgagagcgagctgacaccaggcggtggtgcttcaacaaggggctggagatcatcgtggtcatgaactctcctagcaatgacctcaacgacagtcacgttcagatagcctaccactccagccgagagcatttgcccctggcctatgcagtactctacctcacctgtgtggacatcaccctagactgtgacatgaactgtgcggaccggcaggacaggagcttcgtggataagaggcagtgggtgtgggggcctgatgggtacggagccatcttgctggtgaactgtgatcgggacaatgtcgactctaatgcccaagataactgtgaccaatatgtgcgttgcctgcaagatctggaagacatgtctgtcatggtcctacggacccagggccccgaagccctctttgaggaccacaggcttatcctccacacctccagctgtgatgcagagcgggcacgggtcttccatgtctgcggccccgaggattcctgtgaggcctataagtgtgttctgggcccggacaggatgtcctatgaggtgccccgcctgaagggctatgaggagcgcttcttcgtggagggcctctccttcccggatgcaggcttcccagggctcatttccttccatgtcactctgctggatgattctaatgaggacttctccgagaccccgatcttcaccgacacagcagtgttccgggtggccccctggatcatgacacccagcaccctgccgcccctagaggtgtacgtgtgccgggtgaggaataacacctgctttgtggaagccgtggaggagctggccaggaaggcgggctgcaaactcaccatctgtcctcaggcagagaaccggaacgaccgctggatccaggatgagatggagctggggtatgtgcaggcgccacacaagaccttgccggtggtcttcgattctccgaggaacggagagctgcagggcttcccttacaaaaggatcctgggtctagatttcggctatgtgactcgggaacctaaagacagttctgtgagtggtctggactcttttggcaacctggaggtcagtccacccgtggtggccaatgggaaggagtatcccttggggagaatcctcatcgggggcaacctgcctgggtcgagaggccgcagagtgacccaggtggtgcgaaacttcctccatgcccagaaagtgcaacctctggtggagctgtttgtggactggctggctgtgggccacgtggatgagttcctgagcttcgtccctgcacccgacgggaaaggcttccgcctcctcctggccagccctggcgcctgcttcaggctattccaggaaaagcagaagtggggccatggcaggtccctgcttttcgagggtgtcattggcgacaggcgggtccagaccgtctccatcaatcagattcttaacaaccagagccttatcaactttaataagtttgcacagagctgtatcgactggaaccgcgaggtactgaagcgggagctgggcctggcggagggtgacatcatcgacatcccgcagctcttcaagacggagaagaggaaggcagtagcgttcttccccgacttggtgaatatgctggtcctgggcaagcacctgggcatccccaagcccttcgggcccatcatcaatggtcgctgctgcctggaggagaaggtgcgctccctgctggagccgctgggtctgcactgcaccttcatcgatgacttcacgccataccacatgctgcacggggaggttcactgtggcaccaacgtgcgccgggagcccttcgccttcaagtggtggcacatggtgccctgagccaccacccatcccccaccctccccccaggatggggtgtccgcctggcagatggagactgggacagaccccagaacaacaagcagctaaagacccccggtttctagactgaatgcccagggtgacccaagcccctcagaagccttttctcttgaaatgtctgcctttatctgccactcattcagatcccagacgtgaatcctcttggtgtccccaagaaagggccctgtgtctaccagactctcatggggatcaacgtgacccatggcgatagctttaaacaccatccccacaaactcctctgtttgtgggtaaatccactcggatgtctagaggctttgaccttgtcagcatcttggcctgcacttcctatggtggaaggcccaggggtttggttttggccactgtctcctgccctgcaggggatggttttaaagtcagacaattttacatattcttgtacgagtagactactccacatgagagagtctaccccaggaagcaccccagggtccattcaagtccaagtgtgaccatcattcttactgcaagctcccggccaggaccggcctttactgagctgtcacacagtgggtacctctaggtgcttttgggatggcaggtatctcttagccttacaagctccccatcatctgatgcccaggaatcgggttgtccaaatcctcttgaaatttctctgaagtgaagcggctgggggcagggggaaggggggcagcgctgttgatggttaggaaaactggattcccagagaaatctaagacaggaccgaccctggggtcgcccccatctcgaggaggatgctcagctggcctgggggctctgcacaggagaagagaccactggctgacttaactctgagctttctgcctatacagccatcctgcaggttgccatagaggcaggactcagtgggacagttgaacctctccacatactgggagaagggaggggcgtggctgtctcaagatgtgttctgtgagtccagctggccaaaaaataaacagaagcac

SEQ ID NO: 1374 - DNA, 1796 bp, Mus musculus; identical to SEQ ID NO: 1297
  misc_feature (166)..(166): "n" = a, t, g, or c.

SEQ ID NO: 1375 - DNA, 2029 bp, Mus musculus; identical to SEQ ID NO: 1186

SEQ ID NO: 1376 - protein, 1170 aa, Mus musculus
MELLRGLGVLFLLHMCGSNRIPESGGDNGVFDIFELIGGARRGPGRRLVKGQDLSSPAFRIENANLIPAVPDDKFQDLLDAVWADKGFIFLASLRQMKKTRGTLLAVERKDNTGQIFSVVSNGKAGTLDLSLSLPGKQQVVSVEEALLATGQWKSITLFVQEDRAQLYIDCDKMESAELDVPIQSIFTRDLASVARLRVAKGDVNDNFQGVLQNVRFVFGTTPEDILRNKGCSSSTNVLLTLDNNVVNGSSPAIRTNYIGHKTKDLQAICGLSCDELSSMVLELKGLRTIVTTLQDSIRKVTEENRELVSELKRPPLCFHNGVQYKNNEEWTVDSCTECHCQNSVTICKKVSCPIMPCSNATVPDGECCPRCWPSDSADDGWSPWSEWTSCSATCGNGIQQRGRSCDSLNNRCEGSSVQTRTCHIQECDKRFKQDGGWSHWSPWSSCSVTCGDGVITRIRLCNSPSPQMNGKPCEGEARETKACKKDACPINGGWGPWSPWDICSVTCGGGVQRRSRLCNNPTPQFGGKDCVGDVTENQVCNKQDCPIDGCLSNPCFAGAKCTSYPDGSWKCGACPPGYSGNGIQCKDVDECKEVPDACFNHNGEHRCKNTDPGYNCLPCPPRFTGSQPFGRGVEHAMANKQVCKPRNPCTDGTHDCNKNAKCNYLGHYSDPMYRCECKPGYAGNGIICGEDTDLDGWPNENLVCVANATYHCKKDNCPNLPNSGQEDYDKDGIGDACDDDDDNDKIPDDRDNCPFHYNPAQYDYDRDDVGDRCDNCPYNHNPDQADTDKNGEGDACAVDIDGDGILNERDNCQYVYNVDQRDTDMDGVGDQCDNCPLEHNPDQLDSDSDLIGDTCDNNQDIDEDGHQNNLDNCPYVPNANQADHDKDGKGDACDHDDDNDGIPDDRDNCRLVPNPDQKDSDGDGRGDACKDDFDHDNVPDIDDICPENFDISETDFRRFQMIPLDPKGTSQNDPNWVVRHQGKELVQTVNCDPGLAVGYDEFNAVDFSGTFFINTERDDDYAGFVFGYQSSSRFYVVMWKQVTQSYWDTNPTRAQGYSGLSVKVVNSTTGPGEHLRNALWHTGNTPGQVRTLWHDPRHIGWKDFTAYRWRLSHRPKTGYIRVVMYEGKKIMADSGPIYDKTYAGGRLGLFVFSQEMVFFSDMKYECRDS

SEQ ID NO: 1377 - protein, 811 aa, Mus musculus
MVPLLPLYALLLLFLCDINPANANSYYDKVLAHSRIRGRDQGPNVCALQQILGTKKKYFSSCKNWYQGAICGKKTTVLYECCPGYMRMEGMKGCPAVMPIDHVYGTLGIVGATTTQHYSDVSKLREEIEGKGSYTYFAPSNEAWENLDSDIRRGLENNVNVELLNALHSHMVNKRMLTKDLKHGMVIPSMYNNLGLFINHYPNGVVTVNCARVIHGNQIATNGVVHVIDRVLTQIGTSIQDFLEAEDDLSSFRAAAITSDLLESLGRDGHFTLFAPTNEAFEKLPRGVLERIMGDKVASEALMKYHILNTLQCSEAITGGAVFETMEGNTIEIGCEGDSISINGIKMVNKKDIVTKNGVIHLIDEVLIPDSAKQVIELAGKQQTTFTDLVAQLGLASSLKPDGEYTLLAPVNNAFSDDTLSMDQRLLKLILQNHILKVKVGLSDLYNGQILETIGGKQLRVFVYRTAICIENSCMVRGSKQGRNGAIHIFREIIQPAEKSLHDKLRQDKRFSIFLSLLEAADLKDLLTQPGDWTLFAPTNDAFKGMTSEERELLIGDKNALQNIILYHLTPGVYIGKGFEPGVTNILKTTQGSKIYLKGVNETLLVNELKSKESDIMTTNGVIHVVDKLLYPADIPVGNDQLLELLNKLIKYIQIKFVRGSTFKEIPMTVYRPAMTKIQIEGDPDFRLIKEGETVTEVIHGEPVIKKYTKIIDGVPVEITEKQTREERIITGPEIKYTRISTGGGETGETLQKFLQKEVSKVTKFIEGGDGHLFEDEEIKRLLQGDTPAKKIPANKRVQGPRRRSREGRSQ

SEQ ID NO: 1378 - protein, 790 aa, Mus musculus
MRTYRYFLLLFWVGQPYPTFSNPLSKRTSGFPAKRKALELSADSRNELSRSKRGWMWNQFFLLEGYTGSDYQYVGKLHSDQDRGDGSLKYILSGDGAGDLFIINEHTGDIQATKRLDREEKPVYILRAQAVNRRTGRPVEPESEFIIKIHDINDNEPIFTKDVYTATVPEMADVGTFVVQVTATDADDPTYGNSAKVVYSILQGQPYFSVESETGIIKTALLNMDRENREQYQVVIQAKDMGGQMGGLSGTTTVNITLTDVNDNPPRFPQSTYQFKTPESSPPGTPIGRIKASDADVGENAEIEYSITDGEGHEMFDVITDQETQEGIITVKKLLDFEKKKVYTLRWKASNPHVEPRFLYLGPFKDSATVRIVVDDVDEPPVFSKLAYILQIREDARINTTIVSVAAQDPDAARNPVKYSVDRHTDMDRIFNIDSGNGSIFTSKLLDRETLLWHNITVIATEIKNPKQSSRVPLYIKVLDVNDNAPEFAEFYETFVCEKAKADQLIQTLRAVDKDDPYSGHQFSFSLAPEAASSSNFTIQDNKDNTAGILTRKNGYNRHEMSTYLLPVVISDNDYPVQSSTGTVTVRVCACDHHGNIESCHAEALIHPTGLSSGALVAILLCIVILLVTVVLFAALRRQEKKEPLIISKEDIRDNIVSYNDEGGGEEDTQAFDIGTLRNPEAMEDSKSRRDIVPEALFLPRRTPTARDNTDVRDFINQRLKENDTDPTAPPYDSLATYAYEGTGSVADSLSSLESVTTDGDQDYDYLSDWGPRFKKVADMYGGMDSDKDS

SEQ ID NO: 1379 - protein, 537 aa, Mus musculus
MASTRAKPTLPLLLALVTVVIPGPGDAQVSIHPREAFLPQGGSVQVNCSSSCKEDLSLGLETQWLKDELESGPNWKLFELSEIGEDSSPLCFENCGTVQSSASATITVYSFPESVELRPLPAWQQVGKDLTLRCHVDGGAPRTQLSAVLLRGEEILSRQPVGGHPKDPKEITFTVLASRGDHGANFSCRTELDLRPQGLALFSNVSEARSLRTFDLPATIPKLDTPDLLEVGTQQKLFCSLEGLFPASEARIYLELGGQMPTQESTNSSDSVSATALVEVTEEFDRTLPLRCVLELADQILETQRTLTVYNFSAPVLTLSQLEVSEGSQVTVKCEAHSGSKVVLLSGVEPRPPTPQVQFTLNASSEDHKRSFFCSAALEVAGKFLFKNQTLELHVLYGPRLDETDCLGNWTWQEGSQQTLKCQAWGNPSPKMTCRRKADGALLPIGVVKSVKQEMNGTYVCHAFSSHGNVTRNVYLTVLYHSQNNWTIIILVPVLLVIVGLVMAASYVYNRQRKIRIYKLQKAQEEAIKLKGQAPPP

SEQ ID NO: 1380 - protein, 244 aa, Mus musculus; identical to SEQ ID NO: 552

SEQ ID NO: 1381 - protein, 292 aa, Mus musculus
MELLCCEGTRHAPRAGPDPRLLGDQRVLQSLLRLEERYVPRASYFQCVQKEIKPHMRKMLAYWMLEVCEEQRCEEDVFPLAMNYLDRYLSCVPTRKAQLQLLGTVCLLLASKLRETTPLTIEKLCIYTDQAVAPWQLREWEVLVLGKLKWDLAAVIAHDFLALILHRLSLPSDRQALVKKHAQTFLALCATDYTFAMYPPSMIATGSIGAAVLGLGACSMSADELTELLAGITGTEVDCLRACQEQIEAALRESLREAAQTAPSPVPKAPRGSSSQGPSQTSTPTDVTAIHL

SEQ ID NO: 1382 - protein, 100 aa, Mus musculus
MNRKVTAIALAAIIWATAAQGFLMFKQGRCLCIGPGMKAVKMAEIEKASVIYPSNGCDKVEVIVTMKAHKRQRCLDPRSKQARLIMQAIEKKNFLRRQNM

SEQ ID NO: 1383 - protein, 98 aa, Mus musculus
MNPSAAVIFCLILLGLSGTQGIPLARTVRCNCIHIDDGPVRMRAIGKLEIIPASLSCPRVEIIATMKKNDEQRCLNPESKTIKNLMKAFSQKRSKRAP

SEQ ID NO: 1384 - protein, 383 aa, Mus musculus
MAFVHIRCLCFILLCTITGYSLEIKVNPPQDFEILDPGLLGYLYLQWKPPVVIEKFKGCTLEYELKYRNVDSDSWKTIITRNLIYKDGFDLNKGIEGKIRTHLSEHCTNGSEVQSPWIEASYGISDEGSLETKIQDMKCIYYNWQYLVCSWKPGKTVYSDTNYTMFFWYEGLDHALQCADYLQHDEKNVGCKLSNLDSSDYKDFFICVNGSSKLEPIRSSYTVFQLQNIVKPLPPEFLHISVENSIDIRMKWSTPGGPIPPRCYTYEIVIREDDISWESATDKNDMKLKRRANESEDLCFFVRCKVNIYCADDGIWSEWSEEECWEGYTGPDSKIIFIVPVCLFFIFLLLLLCLIVEKEEPEPTLSLHVDLNKEVCAYEDTLC

SEQ ID NO: 1385 - protein, 414 aa, Mus musculus
MHYCVLSTFLLLHLVPVALSLSTCSTLDMDQFMRKRIEAIRGQILSKLKLTSPPEDYPEPDEVPPEVISIYNSTRDLLQEKASRRAAACERERSEQEYYAKEVYKIDMPSHLPSENAIPPTFYRPYFRIVRFDVSTMEKNASNLVKAEFRVFRLQNPKARVAEQRIELYQILKSKDLTSPTQRYIDSKVVKTRAEGEWLSFDVTDAVQEWLHHKDRNLGFKISLHCPCCTFVPSNNYIIPNKSEELEARFAGIDGTSTYASGDQKTIKSTRKKTSGKTPHLLLMLLPSYRLESQQSSRRKKRALDAAYCFRNVQDNCCLRPLYIDFKRDLGWKWIHEPKGYNANFCAGACPYLWSSDTQHTKVLSLYNTINPEASASPCCVSQDLEPLTILYYIGNTPKIEQLSNMIVKSCKCS

SEQ ID NO: 1386 - protein, 397 aa, Mus musculus
MVKETTYYDVLGVKPNATQEELKKAYRKLALKYHPDKNPNEGEKFKQISQAYEVLADSKKRELYDKGGEQAIKEGGAGGGFGSPMDIFDMFFGGGGRMQRERRGKNVVHQLSVTLEDLYNGATRKLALQKNVICDKCEGRGGKKGAVECCPNCRGTGMQIRIHQIGPGMVQQIQSVCMECQGHGERISPKDRCKSCNGRKIVREKKILEVHIDKGMKDGQKITFHGEGDQEPGLEPGDIIIVLDQKDHAVFTRRGEDLFMCMDIQLVEALCGFQKPISTLDNRTIVITSHPGQIVKHGDIKCVLNEGMPIYRRPYEKGRLIIEFKVNFPENGFLSPDKLSLLEKLLPERKEVEETDEMDQVELVDFDPNQERRRHYNGEAYEDDEHHPRGGVQCQTS

SEQ ID NO: 1387 - protein, 159 aa, Mus musculus
MTLEEVRGQDTVPESTARMQGAGKALHELLLSAHGQGCLTAGVYESAKVLNVDPDNVTFCVLAADEEDEGDIALQIHFTLIQAFCCENDIDIVRVGDVQRLAAIVGADEEGGAPGDLHCILISNPNEDTWKDPALEKLSLFCEESRSFNDWVPSITLPE

SEQ ID NO: 1388 - protein, 1144 aa, Mus musculus
MACPWKFLFKVKSYQSDLKEEKDINNNVKKTPCAVLSPTIQDDPKSHQNGSPQLLTGTAQNVPESLDKLHVTSTRPQYVRIKNWGSGEILHDTLHHKATSDFTCKSKSCLGSIMNPKSLTRGPRDKPTPLEELLPHAIEFINQYYGSFKEAKIEEHLARLEAVTKEIETTGTYQLTLDELIFATKMAWRNAPRCIGRIQWSNLQVFDARNCSTAQEMFQHICRHILYATNNGNIRSAITVFPQRSDGKHDFRLWNSQLIRYAGYQMPDGTIRGDAATLEFTQLCIDLGWKPRYGRFDVLPLVLQADGQDPEVFEIPPDLVLEVTMEHPKYEWFQELGLKWYALPAVANMLLEVGGLEFPACPFNGWYMGTEIGVRDFCDTQRYNILEEVGRRMGLETHTLASLWKDRAVTEINVAVLHSFQKQNVTIMDHHTASESFMKHMQNEYRARGGCPADWIWLVPPVSGSITPVFHQEMLNYVLSPFYYYQIEPWKTHIWQNEKLRPRRREIRFRVLVKVVFFASMLMRKVMASRVRATVLFATETGKSEALARDLATLFSYAFNTKVVCMDQYKASTLEEEQLLLVVTSTFGNGDCPSNGQTLKKSLFMLRELNHTFRYAVFGLGSSMYPQFCAFAHDIDQKLSHLGASQLAPTGEGDELSGQEDAFRSWAVQTFRAACETFDVRSKHHIQIPKRFTSNATWEPQQYRLIQSPEPLDLNRALSSIHAKNVFTMRLKSQQNLQSEKSSRTTLLVQLTFEGSRGPSYLPGEHLGIFPGNQTALVQGILERVVDCPTPHQTVCLEVLDESGSYWVKDKRLPPCSLSQALTYFLDITTPPTQLQLHKLARFATDETDRQRLEALCQPSEYNDWKFSNNPTFLEVLEEFPSLHVPAAFLLSQLPILKPRYYSISSSQDHTPSEVHLTVAVVTYRTRDGQGPLHHGVCSTWIRNLKPQDPVPCFVRSVSGFQLPEDPSQPCILIGPGTGIAPFRSFWQQRLHDSQHKGLKGGRMSLVFGCRHPEEDHLYQEEMQEMVRKRVLFQVHTGYSRLPGKPKVYVQDILQKQLANEVLSVLHGEQGHLYICGDVRMARDVATTLKKLVATKLNLSEEQVEDYFFQLKSQKRYHEDIFGAVFSYGAKKGSALEEPKATRL

SEQ ID NO: 1389 - protein, 737 aa, Mus musculus
MEDRGARPGRLMPMLALLSWAAGLGVAEETPGRIPADKLLVITVATKENDGFHRFMNSAKYFNYTVKVLGQGQEWRGGDGMNSIGGGQKVRLLKEAMEHYASQEDLVILFTECFDVVFAGGPEEVLKKFQKTNHKIVFAADGLLWPDKRLADKYPVVHIGKRYLNSGGFIGYAPYISRLVQQWNLQDNDDDQLFYTKVYIDPLKREAFNITLDHKCKIFQALNGATDEVVLKFENGKSRVKNTFYETLPVAINGNGPTKILLNYFGNYVPNSWTQENGCALCDVDTIDLSTVDVPPKVTLGVFIEQPTPFLPRFLNLLLTLDYPKEALQLFIHNKEVYHEKDIKVFVDKAKHDISSIKIVGPEENLSQAEARNMGMDFCRQDEKCDYYFSVDADVVLTNPRTLKILIEQNRKIIAPLVTRHGKLWSNFWGALSPDGYYARSEDYVDIVQGNRVGIWNVPYMANVYLIQGKTLRSEMNERNYFVRDKLDPDMALCRNARDMGVFMYISNRHEFGRLISTANYNTSHLNNDFWQIFENPVDWKEKYINRDYSKIFTENIVEQPCPDVFWFPIFSERACDELVEEMEHYGKWSGGKHHDSRISGGYENVPTDDIHMKQIGLENVWLHFIREFIAPVTLKVFAGYYTKGFALLNFVVKYSPERQRSLRPHHDASTFTINIALNNVGEDFQGGGCKFLRYNCSIESPRKGWSFMHPGRLTHLHEGLPVKNGTRYIAVSFIDP

SEQ ID NO: 1390 - protein, 760 aa, Mus musculus
MKTPWKVLLGLLGVAALVTIITVPIVLLSKDEAAADSRRTYSLADYLKSTFRVKSYSLWWVSDFEYLYKQENNILLLNAEHGNSSIFLENSTFESFGYHSVSPDRLFVLLEYNYVKQWRHSYTASYNIYDVNKRQLITEEKIPNNTQWITWSPEGHKLAYVWKNDIYVKVEPHLPSHRITSTGEENVIYNGITDWVYEEEVFGAYSALWWSPNNTFLAYAQFNDTGVPLIEYSFYSDESLQYPKTVWIPYPKAGAVNPTVKFFIVNIDSLSSSSSAAPIQIPAPASVARGDHYLCDVVWATEERISLQWLRRIQNYSVMAICDYDKINLTWNCPSEQQHVEMSTTGWVGRFRPAEPHFTSDGSSFYKIISDKDGYKHICHFPKDKKDCTFITKGAWEVISIEALTSDYLYYISNQYKEMPGGRNLYKIQLTDHTNVKCLSCDLNPERCQYYAVSFSKEAKYYQLGCWGPGLPLYTLHRSTDHKELRVLEDNSALDRMLQDVQMPSKKLDFIVLNETRFWYQMILPPHFDKSKKYPLLLDVYAGPCSQKADASFRLNWATYLASTENIIVASFDGRGSGYQGDKIMHAINRRLGTLEVEDQIEAARQFVKMGFVDSKRVAIWGWSYGGYVTSMVLGSGSGVFKCGIAVAPVSRWEYYDSVYTERYMGLPIPEDNLDHYRNSTVMSRAEHFKQVEYLLIHGTADDNVHFQQSAQISKALVDAGVDFQAMWYTDEDHGIASSTAHQHIYSHMSHFLQQCFSLH

SEQ ID NO: 1391 - protein, 338 aa, Mus musculus
MANHAPFETDISTLTRFVMEQGRKAQGTGELTQLLNSLCTAIKAISSAVRQAGIAQLYGIAGSTNVTGDQVKKLDILSNDLVINMLKSSYATCVLVSEENTNAIIIEPEKRGKYVVCFDPLDGSSNIDCLVSIGTIFGIYRKKSTDEPSEKDALQPGRDLVAAGYALYGSATMLVLAMDCGVNCFMLDPSIGEFIMVDRDVKMKKKGNIYSLNEGYAKDFDPAINEYLQRKKFPPDGSAPYGARYVGSMVADIHRTLVYGGIFLYPANKKSPSGKLRLLYECNPIAYVMEKAGGLATTGDKDILDIVPTEIHQKAPVVMGSSEDVQEFLEIYRKHKAK

SEQ ID NO: 1392 - protein, 481 aa, Mus musculus
MADMPSGESCTSPLELFNSIATQGELVRSLKAGNAPKDEIDSAVKMLLSLKMSYKAAMGEEYKAGCPPGNPTAGRNCDSDATKASEDFVDPWTVRTSSAKGIDYDKLIVQPGSSKIDKELINRIERATGQRPHRFLRRGIFFSHRDMNQILDAYENKKPFYLYTGRGPSSEAMHLGHLVPFIFTKWLEDVFNVPLVIQMSDDEKYLWKDLTLEQAYSYTVENAKDIIACGFDINKTFIFSDLEYMGQSPGFYRNVVKIQKHVTFNQVKGIFGFTDSDCIGKSSFPAVQAAPSFSNSFPKIFRDRTDIQCLIPCAIDQDPYFRMTRDVAPRIGHPKPALLHSTFFPALQGAQTKMSASDPNSSIFLTDTAKQIKSKVNKHAFSGGRDTVEEHRQFGGNCEVDVSFMYLTFFLEDDDRLEQIRKDYTSGAMLTGELKKTLIDVLQPLIAEHQARRKAVTEETVKEFMTPRQLSFHFQCFCFDT

SEQ ID NO: 1393 - protein, 358 aa, Mus musculus
MSPFASESAWLCLAAAAVLGGTLLCGCRSGRQLRSRPVCLAGLWGGACLLSLSLLCTLFLLSVACFLLLYMSSSDQDLLPVDQKAVLVTGADSGFGHGLAKHLDKLGFTVFAGVLDKEGPGAEELRKHCSERLSVLQMDVTKPEQIKDAHSKVTEKIQDKGLWAVVNNAGVFHLPIDGELIPMSIYRKCMAVNFFGTVEVTKAFLPLLRKSKGRLVNVSSMGGTVPLQMTSAYAATKAALTMFSTIIRQELDKWGVKVVTIKPGGFKTNITGSQDIWDKMEKEILDHFSKDIQENYGQDYVHTQKLIIPTLKERSNPDITPVLRDIQHAISARNPSSFYYPGRMAYLWVCLAAYCPTS

SEQ ID NO: 1394 - protein, 219 aa, Mus musculus
MLRAGAPTAGSFRTEEVHTGTTIMAVEFDGGVVVGSDSRVSAGTAVVNRVFDKLSPLHQHIFCALSGSAADAQAIADMAAYQLELHGLELEEPPLVLAAANVVKNISYKYREDLLAHLIVAGWDQCEGGQVYGTMGGMLIRQPFTIGGSGSSYIYGYVDAAYKPGMTPEECRRFTTDAITLAMNRDGSSGGVIYLVTITAAGVDHRVILGDELPKFYDE

SEQ ID NO: 1395 - protein, 354 aa, Mus musculus
DKFIEDYLLPDTTFGADVKSAVNVVCDFLKERCFQGAAHPVRVSKVVKGGSSGKGTTLKGKSDADLVVFLNNLTSFEDQLNRRGEFIKEIKKQLYEVQHERRFRVKFEVQSSWWPNARSLSFKLSAPHLHQEVEFDVLPAFDVLGHGSINKKPNPLIYTILIWECTSLGKDGEFSTCFTELQRNFLKQRPTKLKSLIRLVKHWYQLCKEKLGKPLPPQYALELLTVYAWEQGNGCNEFNTAQGFRTVLELVINYQHLRIYWTKYYDFQHKEVSKYLHRQLRKARPVILDPADPTGNVAGGNPEGWRRLAEEADVWLWYPCFMKNDGSRVSSWDVPTVVPVPFEQVEENWTCILL

SEQ ID NO: 1396 - protein, 686 aa, Mus musculus
MAEELLLERCDLEIQANGRDHHTADLCQEKLVLRRGQRFRLTLYFEGRGYEASVDSLTFGAVTGPDPSEEAGTKARFSLSDNVEEGSWSASVLDQQDNVLSLQLCTPANAPIGLYRLSLEASTGYQGSSFVLGHFILLYNAWCPADDVYLDSEEERREYVLTQQGFIYQGSVKFIKSVPWNFGQFEDGILDTCLMLLDMNPKFLKNRSRDCSRRSSPIYVGRVVSAMVNCNDDQGVLLGRWDNNYGDGISPMAWIGSVDILRRWKEHGCQQVKYGQCWVFAAVACTVLRCLGIPTRVVTNYNSAHDQNSNLLIEYFRNEFGELESNKSEMIWNFHCWVESWMTRPDLQPGYEGWQAIDPTPQEKSEGTYCCGPVSVRAIKEGDLSTKYDAPFVFAEVNADVVDWIRQEDGSVLKSINRSLVVGQKISTKSVGRDDREDITHTYKYPEGSPEEREVFTKANHLNKLAEKEETGVAMRIRVGDSMSMGNDFDVFAHIGNDTSETRECRLLLCARTVSYNGVLGPECGTEDINLTLDPYSENSIPLRILYEKYSGCLTESNLIKVRGLLIEPAANSYLLAERDLYLENPEIKIRVLGEPKQNRKLVAEVSLKNPLSDPLYDCIFTVEGAGLTKEQKSVEVSDPVPAGDLVKARVDLFPTDIGLHKLVVNFQCDKLKSVKGYRNVIIGPA

SEQ ID NO: 1397 - protein, 497 aa, Mus musculus
MNGSKDPPGSYDFDLIIIGGGSGGLAAAKEAAKFDKKVLVLDFVTPTPLGTRWGLGGTCVNVGCIPKKLMHQAALLGQALKDSRNYGWKVEDTVKHDWEKMTESVQSHIGSLNWGYRVALREKKVVYENAYGRFIGPHRIVATNNKGKEKIYSAERFLIATGERPRYLGIPGDKEYCISSDDLFSLPYCPGKTLVVGASYVALECAGFLAGIGLDVTVMVRSILLRGFDQDMANKIGEHMEEHGIKFIRQFVPTKIEQIEAGTPGRLRVTAQSTNSEETIEGEFNTVLLAVGRDSCTRTIGLETVGVKINEKTGKIPVTDEEQTNVPYIYAIGDILEGKLELTPVAIQAGRLLAQRLYGGSNVKCDYDNVPTTVFTPLEYGCCGLSEEKAVEKFGEENIEVYHSFFWPLEWTVPSRDNNKCYAKIICNLKDDERVVGFHVLGPNAGEVTQGFAAALKCGLTKQQLDSTIGIHPVCAEIFTTLSVTKRSGGDILQSGC

SEQ ID NO: 1398 - protein, 152 aa, Mus musculus
MASKRVAKELESLSKELPPYLRQLSSDYANVLVWHMLLLPDQLPYGLKAFQVRIDFPREYPFKPPTLRFTTKIYHPNVREDGLVCLPLISNENWKPYTKPYQVLEALNVLVSKPNLEEPVRLELADLLTQNPEMFRKKAEEFTLKFGVDRPS

SEQ ID NO: 1399 - protein, 403 aa, Mus musculus
MIHTNLKRKFSCFVLVFLLFAIICVWKKGSDYEALTLQAKVFQMPKSQEKVAVGPAPQAVFSNSKQDPKEGVQILSYPRVTAKVKPQPSLQVWDKDSTYSKLNPRLLKIWRNYLNMNKYKVSYKGPGPGVRFSVEGLRCHLRDHVNVSMIEATDSPFNTTEWEGYLPKETFRTKAGPCTKCAVVSSAGSLKNSQLGREIDNHDAVLRFNGAPTDNFQQDVGTKTTIRLVNSQLVTTEKRFLKDSLYTEGILILWDPSVYHADIPQWYQKPDYNFFETYKSYRRLHPSQPFYILKPQMPWELWDIIQEISPDLIQPNPPSSGMLGIIIMMTLCDQVDIYEFLPSKRKTDVCYYHQKFFDSACTMGAYHPLLFEKNMVKHLNEGTDEDIYLFGKATLSGFRNNRC

SEQ ID NO: 1400 - protein, 311 aa, Mus musculus [sequence omitted]

SEQ ID NO: 1401 - protein, 594 aa, Mus musculus
MQSAPLEQPAKRPRCDGSPRTPPSTPPATANLSADDDFQNTDLRTWEPEDVCSFLENRGFREKKVLDIFRDNKIAGSFLPFLDEDRLEDLGVSSLEERKKMIECIQQLSQSRIDLMKVFNDPIHGHIEFHPLLIRIIDTPQFQRLRYIKQLGGGYYVFPGASHNRFEHSLGVGYLAGCLVRALAEKQPELQISERDILCVQIAGLCHDLGHGPFSHMFDGRFIPRARPEKKWKHEQGSIEMFEHLVNSNELKLVMKNYGLVPEEDITFIKEQIMGPPITPVKDSLWPYKGRPATKSFLYEIVSNKRNGIDVDKWDYFARDCHHLGIQNNFDYKRFIKFARICEVEYKVKEDKTYIRKVKHICSREKEVGNLYDMFHTRNCLHRRAYQHKISNLIDIMITDAFLKADPYVEITGTAGKKFRISTAIDDMEAFTKLTDNIFLEVLHSTDPQLSEAQSILRNIECRNLYKYLGETQPKREKIRKEEYERLPQEVAKAKPEKAPDVELKAEDFIVDVINVDYGMEDKNPIDRVHFYCKSNSKQAVRINKEQVSQLLPEKFAEQLIRVYCKKKDGKSLDAREALCSVVCAQGLHQATGW

SEQ ID NO: 1402 - protein, 160 aa, Mus musculus
MAWDLKVKMLGGNDFLVSVTNSMTVSELKKQIAQKIGVPAFQQRLAHQTAVLQDGLTLSSLGLGPSSTVMLVVQNCSEPLSILVRNERGHSNIYEVFLTQTVDTLKKKVSSGTSHEDQFWLSFEGRPMEDKELLGEYGLKPQCTVIKHLRLRGGGGDQCA

SEQ ID NO: 1403 - protein, 463 aa, Mus musculus
MGENADGDQVMENLLQLRCHFTWKLLFENNDIPDLEVRISEQVQFLDIKNPLGMHNLLAYVRHLKGQQDEALQSLKEAEALIQSEQLSKRSLATWGNCAWLHYHRGSLAEAQVYLDKVEKVCKEFSSPFRYRLECAEMDCEEGWALLKCGGGNYKQAMACFAKALKVEPENPEYNTGYAVVAYRQDLDDNFISLEPLRKAVRLNPEDPYLKVLLALKLQDLGEHVEAEAHIEEALSSTSCQSYVIRYAAKYFRRKHRVDKALHLLNRALQASPSSGYLHYQKGLCYKQQISQLRTSRNRQPRRQDNVQELAQQAIHEFQETLKLRPTFEMAYVCMAEVQAEIHQYEEAERNFQKALNNKTLVAHIEQDIHLRYGRFLQFHKQSEDKAITLYLKGLKVEEKSFAWRKLLTALEKVAERRVCQNVHLVESTSLLGLVYKLKGQEKNALFYYEKALRLTGEMNPAF

SEQ ID NO: 1404 - protein, 181 aa, Mus musculus
MAGIPEVVAMDCEMVGLGPQRVSGLARCSIVNIHGAVLYDKYIRPEGEITDYRTQVSGVTPQHMVRATPFGEARLEILQLLKGKLVVGHDLKHDFNALKEDMSKYTIYDTSTDRLLWHEAKLQYYSRVSLRLLCKRLLHKNIQNNWRGHCSVEDARATMELYKISQRLRAQRGLPCPGTSD

SEQ ID NO: 1405 - protein, 362 aa, Mus musculus
MGMLVPTALAARLLSLFQQQLGSLWSGLAILFCWLRIALGWLDPGKEQPQVRGELEETQETQEDGNSTQRTTPVSVNYHFTRQCNYKCGFCFHTAKTSFVLPLEEAKRGLLLLKQAGLEKINFSGGEPFLQDRGEYLGKLVRFCKEELALPSVSIVSNGSLIQERWFKDYGEYLDILAISCDSFDEQVNALIGRGQGKKNHVENLQKLRRWCRDYKVAFKINSVINRFNVDEDMNEHIKALSPVRWKVFQCLLIEGENSGEDALREAERFLISNEEFETFLERHKEVSCLVPESNQKMKDSYLILDEYMRFLNCTGGRKDPSKSILDVGVEEAIKFSGFDEKMFLKRGGKYVWSKADLKLDW

SEQ ID NO: 1406 - protein, 337 aa, Mus musculus
MIDRQRMGLWALAILTLPMYLTVTEGSKSSWGLENEALIVRCPQRGRSTYPVEWYYSDTNESIPTQKRNRIFVSRDRLKFLPARVEDSGIYACVIRSPNLNKTGYLNVTIHKKPPSCNIPDYLMYSTVRGSDKNFKITCPTIDLYNWTAPVQWFKNCKALQEPRFRAHRSYLFIDNVTHDDEGDYTCQFTHVENGTNYIVTATRSFTVEEKGFSMFPVITNPPYNHTMEVEIGKPASIACSACFGKGSHFLADVLWQINKTVVGNFGEARIQEEEGRNESSSNDMDCLTSVLRITGVTEKDLSLEYDCLALNLHGMIRHTIRLRRKQPSKECPSHIA

SEQ ID NO: 1407 - protein, 137 aa, Mus musculus
MNHTSQAFITAASGGQPPNYERIKEEYEVAEMGAPHGSASVRTTVINMPREVSVPDHVVWSLFNTLFMNFCCLGFIAYAYSVKSRDRKMVGDVTGAQAYASTAKCLNISTLVLSILMVVITIVSVIIIVLNAQNLHT

SEQ ID NO: 1408 - protein, 248 aa, Mus musculus
MSWSPILPFLSLLLLLFPLEVPRAATASLSQASSEGTTTCKVHDVCLLGPRPLPPSPPVRVSLYYESLCGACRYFLVRDLFPTWLMVMEIMNITLVPYGNAQERNVSGTWEFTCQHGELECRLNMVEACLLDKLEKEAAFLTIVCMEEMDDMEKKLGPCLQVYAPEVSPESIMECATGKRGTQLMHENAQLTDALHPPHEYVPWVLVNEKPLKDPSELLSIVCQLYQGTEKPDICSSIADSPRKVCYK

SEQ ID NO: 1409 - protein, 795 aa, Mus musculus
MEIGVSVAECKSVPGVTSTPHSKDHSSPFYSPSHNGLLADHHESLDNDVAREIQYLDEVLEANCCDSSVDGTYNGISSPEPGAAILVSSLGSPAHSVTEAEPTEKASGRQVPPHIELSRIPSDRMAEGERANGHSTDQPQDLLGNSLQAPASPSSSTSSHCSSRDGEFTLTTLKKEAKFELRAFHEDKKPSKLFEEDEREKEQFCVRKVRPSEEMIELEKERRELIRSQAVKKNPGIAAKWWNPPQEKTIEEQLDEEHLESHRRYKERKEKRAQQEQLQLQQQQQQQLQQQQLQQQQLQQQQLQQQLQQQQLSTSQPCTAPAAHKHLDGIEHTKEDVVTEQIDFSAARKQFQLMENSRQTLAKGQSTPRLFSIKPYYKPLGSIHSDKPPTILRPATVGGTLEDGGTQAAKEQKAPCVSESQSAGAGPANAATQGKEGPYSEPSKRGPLSKLWAEDGEFTSARAVLTVVKDEDHGILDQFSRSVNVSLTQEELDSGLDELSVRSQDTTVLETLSNDFSMDNISDSGASNETTSALQENSLADFSLPQTPQTDNPSEGREGVSKSFSDHGFYSPSSTLGDSPSVDDPLEYQAGLLVQNAIQQAIAEQVDKAEAHTSKEGSEQQEPEATVEEAGSQTPGSEKPQGMFAPPQVSSPVQEKRDILPKNLPAEDRALREKGPSQPPTAAQPSGPVNMEETRPEGGYFSKYSEAAELRSTASLLATQESDVMVGPFKLRSRKQRTLSMIEEEIRAAQEREEELKRQRQVRQSTPSPRAKNAPSLPSRTTCYKTAPGPGGHTG

SEQ ID NO: 1410 - protein, 372 aa, Mus musculus
MKSIEQDAVNTFTKYISPDAAKPIPITEAMRNDIIAKICGEDGQVDPNCFVLDTAVVFSAMEQEHFSEFLRSHHFCKYQIEVLTSGTVYLADILFCESALFYFSEYMEKEDAVNILQFWLAADNFQSQLAAKKGQYDGQEAQNDAMILYDKYFSLQATHPLGFDDVVRLEIESNICREGGPLPNCFTTPLRQAWTTMEKVFLPGFLSSNLYYKYLNDLIHSVRGDEFLGGNVSLAAHGSVCLPEESHSGGSDGSTAQSSVKKASIKILKNFDEAIIVDAASLDPESLYQRTYAGKMSFGRVSDLGQFIRESEPEPDVKKSKGFMFSQAMKKWVQGNTDEAQEELAWKIAKMIVSDVMQQAHHDQPLEKSTKL

SEQ ID NO: 1411 - protein, 966 aa, Mus musculus
MVNSRRVQPQPPGDAGRSPAPRASGPGRLVAGGAGLAVPGGLGEQRGLEIEMERIRQAAARDPPAGASASPSPPLSSCSRQAWSRDNPGFEAEEDDDDDEVEGEEGGMVVEMDVEWRPGSRRSASSSAVSSVGARGRGLGSYRGAAHLSGRRRRLEDQGAQCPSPAGGGDPLHRHLPLEGQPPRVAWAERLVRGLRGLWGTRLMEESNANREKYLKSVLRELVTYLFFLVVLCILTYGMMSSNVYYYTRTLSQLFIDTPVSKTEKTNFKTLSSMEDFWKFTEGSFLDGLYWKAQTSNHTQADNRSFIFYENLLLGVPRLRQLRVRNGSCSIPQDLRDEIKECYDVYSVSSEDRAPFGPRNGTAWMYTSEKELNGSSHWGIIASYSGAGYYLDLSRTREETAAQLAGLRRNFWLDRGTRAAFIDFSVYNANINLFCVVRLLAEFPATGGVVPSWQFQPVKLIRYVTAFDFFLAACEIIFCFFIIYYVVEEILEIRIHRLSYFRSFWNCLDVVIVVLSVVAMVINIYRMSNAEGLLQFLEDQNSFPNFEHVAYWQIQFNNISAVMVFLVWIKLFKFINFNRTMSQLSTTMSRCAKDLFGFTIMFSIIFLAYAQLAYLVFGTQVDDFSTFQECIFTQFRIILGDINFAEIEEANRVLGPLYFTTFVFFMFFILLNMFLAIINDSYSEVKSSVAQQKAEMELSDLIRKGCQKALVKLKLKRNTVDAISESLRQGGGKLNFDELRQDLKGEGHTDAEIEAIFTKYDQDGDQELTEREHQQMRDDLEKEREDLDLEHSSLPRPMSSRSFPRSLDDSEEEDDEDSGHSSRRRGSISSGVSYEEFQVLVRRVDRMEHSIGSIVSKIDAVIVKLEIMERAKLKRREVLGRLLDGVAEDARLGRDSEIHREQMERLVREELERWESDDAASQTGHGVSTQVGLGGQPHPRNPRPPSSQSAEGLEGGGGNGSANVHA

SEQ ID NO: 1412 - protein, 888 aa, Mus musculus
MGRVPLAWWLALCCWGCAAHKDTQTEAGSPFVGNPGNITGARGLTGTLRCELQVQGEPPEVVWLRDGQILELADNTQTQVPLGEDWQDEWKVVSQLRISALQLSDAGEYQCMVHLEGRTFVSQPGFVGLEGLPYFLEEPEDKAVPANTPFNLSCQAQGPPEPVTLLWLQDAVPLAPVTGHSSQHSLQTPGLNKTSSFSCEAHNAKGVTTSRTATITVLPQRPHHLHVVSRQPTELEVAWTPGLSGIYPLTHCNLQAVLSDDGVGIWLGKSDPPEDPLTLQVSVPPHQLRLEKLLPHTPYHIRISCSSSQGPSPWTHWLPVETTEGVPLGPPENVSAMRNGSQVLVRWQEPRVPLQGTLLGYRLAYRGQDTPEVLMDIGLTREVTLELRGDRPVRNLTVSVTAYTSAGDGPWSLPVPLEPWRPGQGQPLHHLVSEPPPRAFSWPWWYVLLGALVAAACVLILALFLVHRRKKETRYGEVFEPTVERPELVVRYRVRKSYSRRTTEATLNSLGISEELKEKLRDVMVDRHKVALGKTLGEGEFGAVMEGQLNQDDSILKVAVKTMKIVICTRSELEDFLSEAVCMKEFDHPNVMRLIGVCFQGSDREGFPEPVVILPFMKHGDLHSFLLYSRLGDQPVFLPTQMLVKFMADIASGMEYLSTKRFIHRDLAARNCMLNENMSVCVADFGLSKKIYNGDYYRQGRIAKMPVKWIAIESLADRVYTSKSDVWSFGVTMWEIATRGQTPYPGVENSEIYDYLRQGNRLKQPVDCLDGLYALMSRCWELNPRDRPSFAELREDLENTLKALPPAQEPDEILYVNMDEGGSHLEPRGAAGGADPPTQPDPKDSCSCLTAADVHSAGRYVLCPSTAPGPTLSADRGCPAPPGQEDGA

SEQ ID NO: 1413 - protein, 1379 aa, Mus musculus
MKAPTVLAPGILVLLLSLVQRSHGECKEALVKSEMNVNMKYQLPNFTAETPIQNVVLHGHHIYLGATNYIYVLNDKDLQKVSEFKTGPVLEHPDCLPCRDCSSKANSSGGVWKDNINMALLVDTYYDDQLISCGSVNRGTCQRHVLPPDNSADIQSEVHCMFSPEEESGQCPDCVVSALGAKVLLSEKDRFINFFVGNTINSSYPPGYSLHSISVRRLKETQDGFKFLTDQSYIDVLPEFLDSYPIKYIHAFESNHFIYFLTVQKETLDAQTFHTRIIRFCSVDSGLHSYMEMPLECILTEKRRKRSTREEVFNILQAAYVSKPGANLAKQIGASPSDDILFGVFAQSKPDSAEPVNRSAVCAFPIKYVNDFFNKIVNKNNVRCLQHFYGPNHEHCFNRTLLRNSSGCEARSDEYRTEFTTALQRVDLFMGRLNQVLLTSISTFIKGDLTIANLGTSEGRFMQVVLSRTAHLTPHVNFLLDSHPVSPEVIVEHPSNQNGYTLVVTGKKITKIPLNGLGCGHFQSCSQCLSAPYFIQCGWCHNQCVRFDECPSGTWTQEICLPAVYKVFPTSAPLEGGTVLTICGWDFGFRKNNKFDLRKTKVLLGNESCTLTLSESTTNTLKCTVGPAMSEHFNVSVIISNSRETTQYSAFSYVDPVITSISPRYGPQAGGTLLTLTGKYLNSGNSRHISIGGKTCTLKSVSDSILECYTPAQTTSDEFPVKLKIDLANRETSSFSYREDPVVYEIHPTKSFISGGSTITGIGKTLNSVSLPKLVIDVHEVGVNYTVACQHRSNSEIICCTTPSLKQLGLQLPLKTKAFFLLDGILSKHFDLTYVHNPVFEPFEKPVMISMGNENVVEIKGNNIDPEAVKGEVLKVGNQSCESLHWHSGAVLCTVPSDLLKLNSELNIEWKQAVSSTVLGKVIVQPDQNFAGLIIGAVSISVVVLLLSGLFLWMRKRKHKDLGSELVRYDARVHTPHLDRLVSARSVSPTTEMVSNESVDYRATFPEDQFPNSSQNGACRQVQYPLTDLSPILTSGDSDISSPLLQNTVHIDLSALNPELVQAVQHVVIGPSSLIVHFNEVIGRGHFGCVYHGTLLDNDGKKIHCAVKSLNRITDIEEVSQFLTEGIIMKDFSHPNVLSLLGICLRSEGSPLVVLPYMKHGDLRNFIRNETHNPTVKDLIGFGLQVAKGMKYLASKKFVHRDLAARNCMLDEKFTVKVADFGLARDMYDKEYYSVHNKTGAKLPVKWMALESLQTQKFTTKSDVWSFGVLLWELMTRGAPPYPDVNTFDITIYLLQGRRLLQPEYCPDALYEVMLKCWHPKAEMRPSFSELVSRISSIFSTFIGEHYVHVNATYVNVKCVAPYPSLLPSQDNIDGEGNT

SEQ ID NO: 1414 - protein, 114 aa, Mus musculus
MLAFSLLVLGLLAEVAPASCQQGLGNLQPWMQGLIAVAVFLVLVAIVFAVNHFWCQEEPEPGSTVMIIGNKADGVLVGMDGRYSSMASGFRSSEHKNAYENVLEEEGRVRSTPM

SEQ ID NO: 1415 - protein, 210 aa, Mus musculus
MASMGLQVLGISLAVLGWLGIILSCALPMWRVTAFIGSNIVTAQTSWEGLWMNCVVQSTGQMQCKMYDSMLALPQDLQAARALMVISIIVGALGMLLSVVGGKCTNCMEDETVKAKIMITAGAVFIVASMLIMVPVSWTAHNVIRDFYNPMVASGQKREMGASLYVGWAASGLLLLGGGLLCCSCPPRSNDKPYSAKYSAARSVPASNYV

SEQ ID NO: 1416 - protein, 218 aa, Mus musculus
  MISC_FEATURE (201)..(201): "Xaa" = any amino acid
MGSAALEILGLVLCLVGWVGLILACGLPMWQVTAFLDHNIVTAQTTWKGLWMSCVVQSTGHMQCKVYESVLALSAEVQAARALTVGAVLLALVALFVTLTGAQCTTCVAPGPVKARVALTGGALYAVCGLLALVPLCWFANIVVREFYDPTVPVSQKYELGAALYIGWAASALLMCGGGLVCCGAWVCTGRPEFSFPVKYXAPRRPTANGDYDKKNYV

SEQ ID NO: 1417 - protein, 786 aa, Mus musculus
MEARLEQAVQKRQVLFLYVFLGASWASAEQLQYSVAEETERGTFLANLAKDLGLGLGELSAREARIVSDQNTRFLLLSPLTGELILNEKLDREELCGPTEPCVLTFQLLLERPFQIYRAALHIKDINDNSPVFLDKEILLKISESTTPGATLLLERAQDADVGTNSLSNYTISPNDYFHIHVHDGGEGPIIPELVLDKMLDREEIPEFTLTLTALDGGSPPRSGTALVQILVLDINDNSPQFVQSLYKVQSPENTPVGSLVVAVSARDLDTGSYGQIDYTFFYATERILQTFQINSTSGELYLKRELNYEAIQTYSITIQARDGGGLSGKCAVVVEVMDVNDNPPEFLLSSLNSPIPENSQETVVAVFKIRDRDSGNNGKTLCSIANDLPFVLKPSVENFYTLVTEKPLDRESNTEYNITITVTDMGIPRLTTQHTITVQVSDINDNAPTFTQTSYTMFVRENNSPALHIGTISATDSDSGSNAHITYSLRLPHDPQLALDSLISINADNGQLFALRALDYEALQAFEFHVGAIDQGSPALSSQALVRVVILDDNDNAPFVLYPMQNASAPYTELLPRAAEPGYLVTKVVAVDRDSGQNAWLSFQLLKATEPGLFSVWAHNGEVRTTRLLSERDVPKHKLLVVVKDNGEPPRSASVTLHVLLVDGFSQPFLILPEVARDPAQEDDELTLYLVIALASVSSLFLVSVLLFVGVRLCRRARAASPGVCFVPEEHFPGHLVDVSGAGTLSQNYQYEVCLTGGSGITSEFKFLSPIASNFLTESTGREIE

SEQ ID NO: 1418 - protein, 390 aa, Mus musculus
MIRGRAPRTRPSPPPPLLPLLSLSLLLLSPTVRGDCGPPPDIPNARPILGRHSKFAEQSKVAYSCNNGFKQVPDKSNIVVCLENGQWSSHETFCEKSCVAPERLSFASLKKEYLNMNFFPVGTIVEYECRPGFREQPPLPGKATCLEDLVWSPVAQFCKKKSCPNPKDLDNGHINIPTGILFGSEINFSCNPGYRLVGVSSTFCSVTGNTVDWDDEFPVCTEIHCPEPPKINNGIMRGESDSYTYSQVVTYSCDKGFILVGNASIYCTVSKSDVGQWSSPPPRCIEKSKVPTKKPTINVPSTGTPSTPQKPTTESVPNPGDQPTPQKPSTVKVSATQHVPVTKTTVRHPIRTSTDKGEPNTGGDRYIYGHTCLITLTVLHVMLSLIGYLT

SEQ ID NO: 1419 - protein, 212 aa, Mus musculus
MLAYSVTSSGLFPRMLWALLLLAASLNAHNDVWDEPCCTEHEVSVNRGSRVVMACNISNNLRDVTIELVTSEKTSIIFNHTPPGNYSKDSWQLHIQGVQAQLVITDAQDKHSGNYSWKLHGFQAEFKNFNLTVNAADRQKTEDLPVTKVPDKPPTAVRTEVIIIIAIATTIIITGIGVFVWYKQFPVAPQIQMSVPCLIHGSPGIPYLTLPP

SEQ ID NO: 1420 - protein, 212 aa, Mus musculus
MLAYSVTSSGLFPRMLWALLLLAASLNAYNHVWDKPCCTEHEVSVNRGSRVVMACNISNNLRDVTIELVTSKKTSIIFNQTPPGNYSKDSWQLHIQGGQAQLVITDAQGKHSGEYWWKLRGFQAEFKNFNLIVNAADRQKTEDLPVTKVPDKPPTAVRTEVIIIIAIATTIIITGIGVFVWYKQFPVAPQIQMSVPCLIHGSPGIPYLTLPP

SEQ ID NO: 1421 - protein, 298 aa, Mus musculus
MGCYNGSELQDLGCSSQLLLQPLWDTIRTREAFTRSPIFPVTFSIITYVGFCLPFVVLDVLYPWVPILRRYKIHPDFSPSVKQLLPCLGLTLYQHLVFVFPVTLLHWVRSPALLPQEAPELVQLLSHVLICLLLFDTEIFAWHLLHHKVPWLYRTFHKVHHQNSSSFALATQYMSFWELLSLTFFDVLNVAVLRCHPLTIFTFHVINIWLSVEDHSGYDFPWSTHRLVPFGWYGGVAHHDMHHSQFNCNFAPYFTHWDKMLGTLRSAPLPESLCACGERCVNSRERCAVHLIQKKKQT

SEQ ID NO: 1422 - protein, 663 aa, Mus musculus
MGVYRIRVSTGDSVYAGSNNEVYLWLIGQHGEASLGKLFRPCRNSEAEFKVDVSEYLGPLLFVRVQKWHYLKEDAWFCNWISVKGPGDQGSEYTFPCYRWVQGTSILNLPEGTGCTVVEDSQGLFRNHREEELEERRSLYRWGNWKDGTILNVAATSISDLPVDQRFREDKRLEFEASQVLGTMDTVINFPKNTVTCWKSLDDFNYVFKSGHTKMAERVRNSWKEDAFFGYQFLNGANPMVLKRSTCLPARLVFPPGMEKLQAQLDEELKKGTLFEADFFLLDGIKANVILCSQQYLAAPLVMLKLQPDGQLLPIAIQLELPKTGSTPPPIFTPLDPPMDWLLAKCWVRSSDLQLHELQAHLLRGHLVAEVFAVATMRCLPSVHPVFKLLVPHLLYTMEINVRARSDLISERGFFDKVMSTGGGGHLDLLKQAGAFLTYSSLCPPDDLAERGLLDIDTCFYAKDALQLWQVMNRYVVGMFDLYYKTDQAVQDDYELQSWCQEITEIGLQGAQDRGFPTSLQSRAQACHFITMCIFTCTAQHSSIHLGQLDWFYWVPNAPCTMRLPPPKTKDATMEKLMATLPNPNQSTLQINVVWLLGRRQAVMVPLGQHSEEHFPNPEAKAVLKKFREELAALDKEIEIRNKSLDIPYEYLRPSLVENSVAI

SEQ ID NO: 1423 - protein, 271 aa, Mus musculus
MVLIKEFRVVLPCSVQEYQVGQLYSVAEASKNETGGGEGIEVLKNEPYENDGEKGQYTHKIYHLKSKVPAFVRMIAPEGSLVFHEKAWNAYPYCRTIVTNEYMKDDFFIKIETWHKPDLGTLENVHGLDPNTWKTVEIVHIDIADRSQVEPADYKADEDPALFHSVKTKRGPLGPNWKKELANTPDCPRMCAYKLVTIKFKWWGLQSKVENFIQKQEKRIFTNLHRQLFCWIDKWIDLTMEDIRRMEDETQKELETMRKKGSVRGTSAADA

SEQ ID NO: 1424 - protein, 341 aa, Mus musculus
MMLLLPLLAVFLVKRSHTRTHSLRYFRLAVSDPGPVVPEFISVGYVDSHPITTYDSVTRQKEPKAPWMAENLAPDHWERYTQLLRGWQQTFKAELRHLQRHYNHSGLHTYQRMIGCELLEDGSTTGFLQYAYDGQDFIIFNKDTLSWLAMDYVAHITKQAWEANLHELQYQKNWLEEECIAWLKRFLEYGRDTLERTEHPVVRTTRKETFPGITTFFCRAHGFYPPEISMTWMKNGEEIAQEVDYGGVLPSGDGTYQTWLSVNLDPQSNDVYSCHVEHCGRQMVLEAPRESGDILRVSTISGTTILIIALAGVGVLIWRRSQELKEVMYQPTQVNEGSSPS

SEQ ID NO: 1425 - protein, 334 aa, Mus musculus
MALTMLLLLVAAALTLIETRAGQHSLQYFHTAVSRPGLGEPWFISVGYVDDTQFVRFDSDAENPRMEPRARWMEQEGPEYWERETQIAKGHEQSFRGSLRTAQSYYNQSKGGSHTLQWMYGCDMGSDGRLLRGYLQFAYEGRDYIALNEDLKTWTAVDMAAQITRRKWEQAGIAEKDQAYLEGTCMQSLRRYLQLGKETLLRTDPPKAHVTHHPRSYGAVTLRCWALGFYPADITLTWQLNGEELTQDMELVETRPAGDGTFQKWASVVVPLGKEQNYTCHVNHEGLPEPLTLRWGRWEPPPYTVSNMATIAVVVDLGAVAIIGAVVAFVMNRR

SEQ ID NO: 1426 - protein, 46 aa, Mus musculus
TPKECTNKCCDARTCKIKAGFQCALGECCEKCQLKKPGVVCRAAKD

SEQ ID NO: 1427 - protein, 826 aa, Mus musculus
MLGLWLLSVLWTPAVAPGPPLPHVKQYEVVWPRRLAASRSRRALPSHWGQYPESLSYALGTSGHVFTLHLRKNRDLLGSSYTETYSAANGSEVTEQLQEQDHCLYQGHVEGYEGSAASISTCAGLRGFFRVGSTVHLIEPLDADEEGQHAMYQAKHLQQKAGTCGVKDTNLNDLGPRALEIYRAQPRNWLIPRETRYVELYVVADSQEFQKLGSREAVRQRVLEVVNHVDKLYQELSFRVVLVGLEIWNKDKFYISRYANVTLENFLSWREQNLQGQHPHDNVQLITGVDFIGSTVGLAKVSALCSRHSGAVNQDHSKNSIGVASTMAHELGHNLGMSHDEDIPGCYCPEPREGGGCIMTESIGSKFPRIFSRCSKIDLESFVTKPQTGCLTNVPDVNRFVGGPVCGNLFVEHGEQCDCGTPQDCQNPCCNATTCQLVKGAECASGTCCHECKVKPAGEVCRLSKDKCDLEEFCDGRKPTCPEDAFQQNGTPCPGGYCFDGSCPTLAQQCRDLWGPGARVAADSCYTFSIPPGCNGRMYSGRINRCGALYCEGGQKPLERSFCTFSSNHGVCHALGTGSNIDTFELVLQGTKCEEGKVCMDGSCQDLRVYRSENCSAKCNNHGVCNHKRECHCHKGWAPPNCVQRLADVSDEQAASTSLPVSVVVVLVILVAAMVIVAGIVIYRKAPRQIQRRSVAPKPISGLSNPLFYTRDSSLPAKNRPPDPSETVSTNQPPRPIVKPKRPPPAPPGAVSSSPLPVPVYAPKIPNQFRPDPPTKPLPELKPKQVKPTFAPPTPPVKPGTGGTVPGATQGAGEPKVALKVPIQKR

SEQ ID NO: 1428 - protein, 264 aa, Mus musculus
MQLTLFCFVCLLPGHLALPLSQEAGDVSAHQWEQAQNYLRKFYPHDSKTKKVNSLVDNLKEMQKFFGLPMTGKLSPYIMEIMQKPRCGVPDVAEYSLMPNSPKWHSRIVTYRIVSYTSDLPRIVVDQIVKKALRMWSMQIPLNFKRVSWGTADIIIGFARRDHGDSFPFDGPGNTLGHAFAPGPGLGGDAHFDKDEYWTDDEDAGVNFLFAATHEFGHSLGLSHSSVPGTVMYPTYQRDYSEDFSLTKDDIAGIQKLYGKRNTL

SEQ ID NO: 1429 - protein, 761 aa, Mus musculus
MNWRFVELLYFLFVWGRISVQPSRQEPAGTDQHVSKEFDWLISDRGPFHHSRSYLSFVERHRQGFTTRYKIYREFARWKVRNTAIERRDLVRHPVPLMPEFQRSIRLLGRRPTTQQFIDTIIKKYGTHLLISATLGGEEALTMYMDKSRLDRKSGNVPQSVEALHQLASSYFVDRDGTMRRLHEIQISTGAIKVTETRTGPLGCNSYDNLDSVSSVLLQSTESKLHLQGLQIIFPQYLQEKFVQSALSYIMCNGEGEYVCQNSQCRCQCAEEFPQCNCPITDIQIMEFTLANMAKAWTEAYKDLENSDEFKSFMKRLPSNHFLTIGSIHQHWGNDWDLQSRYKLLQSATEAQRQKIQRTARKLFGLSVRCRHNPNHQLPRERTIQQWLARVQSLLYCNENGFWGTFLESQRSCVCHGSTTLCQRPIPCIIGGNNSCAMCSLANISLCGSCNKGYKLYRGRCEPQNVDSERSEQFISFETDLDFQDLELKYLLQKMDSRLYVHTTFISNEIRLDTFFDPRWRKRMSLTLKSNKNRMDFIHMVIGMSMRICFQRRNSSLDPMFFVYVNPFSGSHSEGWNMPFGEFGYPRWEKIRLQNSQCYNWTLLLGNRVKTFFETVHIYLRSRTRLPTLRNETGQGPVDLSDPSKRQFYIKISDVQVFGYSLRFNADLLRSAVQQVNQSYTQGGQFYSSSSVMLLMLDIRDRINRLAPPVAPGKPQLDLFSCMLKHRLKLTNSEIIRVNHALDLYNTEILKQSDQMTAKLC

SEQ ID NO: 1430 - protein, 132 aa, Mus musculus
MCDAFVGTWKLVSSENFDDYMKEVGVGFATRKVAGMAKPNMIISVNGDLVTIRSESTFKNTEISFKLGVEFDEITADDRKVKSIITLDGGALVQVQKWDGKSTTIKRKRDGDKLVVECVMKGVTSTRVYERA

SEQ ID NO: 1431 - protein, 253 aa, Mus musculus
MGQCGITSSKTVLVFLNLIFWGAAGILCYVGAYVFITYDDYDHFFEDVYTLFPAVVIIAVGALLFIIGLIGCCATIRESRCGLATFVFILLLVFVTEVVVVVLGYVYRAKVENEVDRSIQKVYKTYNGTNSDAASRAIDYVQRQLHCCGIHNYSDWENTDWFKETKNQSVPLSCCRETAKSCNGSLANPSDLYAEGCEALVVKKLQEILMHVIWAALAFAAIQLLGMLCACIVLCRRSRDPAYELLITGGTYA

SEQ ID NO: 1432 - protein, 168 aa, Mus musculus
MAAESLPFTLETVSSWELEAWYEDLQEVLSSDEIGGTYISSPGNEEEESKTFTTLDPASLAWLTEEPGPTEVTRTSQSPRSPDSSQSSMAQEEEEEEQGRTRKRKQSGQCPARPGKQRMKEKEQENERKVAQLAEENERLKQEIERLTREVETTRRALIDRMVSLHQA

SEQ ID NO: 1433 - protein, 145 aa, Mus musculus
MPSKGPLQSVQVFGRKKTLAVAHCKRGNGLIKVNGRPLEMIEPRALQYKLLEPVLLLGKERFAGVDIRVRVKGGGHVAQIYAIRQSISKALVAYYQKYVDEASKKEIKDILIQYDRTLLVADPRRCESKKFGGPGARARYQKSYR

SEQ ID NO: 1434 - protein, 162 aa, Mus musculus
MASVRTCVVRSDQWRLMTFETTENDKVKKINEHIRSQTKVSVQDQILLLDSKILKPHRKLSSYGIDKETTIHLTLKVVKPSDEELPLFLVESKNEGQRHLLRVRRSSSVAQVKEMIESVTSVIPKKQVVNCNGKKLEDGKIMADYNIKSGSLLFLTTHCTGG

SEQ ID NO: 1435 - protein, 462 aa, Mus musculus
MAPGRAVAGLLLLAATSLGHPSEGPELAFSEDVLSVFGANRSLSAAQLGRLLERLGAASQQGALDLGQLHFNQCLSAEDIFSLHGFSNVTQITSSNFSAICPAILQQLNFHPCEDLRKHNAKPSLSEVWGYGFLSVTIINLASLLGLILTPLIKKSYFPKILTYFVGLAIGTLFSNAIFQLIPEAFGFNPKIDNYVEKAVAVFGGFYMLFFVERTLKMLLKTYGQNDHTHFRNDDFGSKEKTHQPKTLPLPAVNGVTCYANPAVTEPNGHIHFDTVSVVSLQDGKTEPSSCTCLKGPKLSEIGTIAWMITLCDALHNFIDGLAIGASCTLSLLQGLSTSIAILCEEFPHELGDFVILLNAGMSTRQALLFSFLSACSCYVGLAFGILVGNNFAPNIIFALAGGMFLYISLADMFPEMNDMLREKVTGRQTDFTFFMIQNAGMLTGFTAILLITLYAGDIELQ

SEQ ID NO: 1436 - protein, 198 aa, Mus musculus
MSSRGHSTLPRTLMAPRMISEGDIGGIAQITSSLFLGKASVASNWHLLQARGITCVINATIEIPNFNWPQFEYVKVPLADIPHAPIRLYFDTVADKIHSVSKKHGATLVHCAAGVSRSATLCIAYLMKFHNLCLLEAYNWVKARRPVIRHNLGFWRQLIEYERQLFGKSSVKMVQTPYGIIPDVYEKESRHLMPYWGI

SEQ ID NO: 1437 - protein, 327 aa, Mus musculus
MDSWVVLLGLQIIWLPLLTHGTAPTPTLRFVAVGDWGGVPNAPFHTAREMANAKEIARTVQTMGADFIMSLGDNFYFTGVHDASDKRFQETFEDVFSDRALRNIPWYVLAGNHDHLGNVSAQIAYSKISKRWNFPSPYYRLRFKIPRTNITVAIFMLDTVMLCGNSDDFASQQPKMPRDLGVARTQLSWLKKQLAAAKEDYVLVAGHYPIWSIAEHGPTRCLVKNLRPLLATYGVTAYLCGHDHNLQYLQDENGVGYVLSGAGNFMDPSVRHQRKVPNGYLRFHYGSEDSLGGFTHVEISPKEMTIIYVEASGKSLFKTSLPRRPRP

SEQ ID NO: 1438 - protein, 212 aa, Mus musculus
MVARNQVAADNAISPAAEPRRRSEPSSSSSSSSPAAPVRPRPCPAVPAPAPGDTHFRTFRSHSDYRRITRTSALLDACGFYWGPLSVHGAHERLRAEPVGTFLVRDSRQRNCFFALSVKMASGPTSIRVHFQAGRFHLDGSRETFDCLFELLEHYVAAPRRMLGAPLRQRRVRPLQELCRQRIVAAVGRENLARIPLNPVLRDYLSSFPFQI

SEQ ID NO: 1439 - protein, 462 aa, Mus musculus
MGPWTHSLRAVLLLVLLGVCTVRSDTPANCTYPDLLGTWVFQVGPRSSRSDINCSVMEATEEKVVVHLKKLDTAYDELGNSGHFTLIYNQGFEIVLNDYKWFAFFKYEVRGHTAISYCHETMTGWVHDVLGRNWACFVGKKVESHIEKVNMNAAHLGGLQERYSERLYTHNHNFVKAINTVQKSWTATAYKEYEKMSLRDLIRRSGHSQRIPRPKPAPMTDEIQQQILNLPESWDWRNVQGVNYVSPVRNQESCGSCYSFASMGMLEARIRILTNNSQTPILSPQEVVSCSPYAQGCDGGFPYLIAGKYAQDFGVVEESCFPYTAKDSPCKPRENCLRYYSSDYYYVGGFYGGCNEALMKLELVKHGPMAVAFEVHDDFLHYHSGIYHHTGLSDPFNPFELTNHAVLLVGYGRDPVTGIEYWIIKNSWGSNWGESGYFRIRRGTDECAIESIAVAAIPIPKL

SEQ ID NO: 1440 - protein, 307 aa, Mus musculus
MFSFNMFDHPIPRVFQNRFSTQYRCFSVSMLAGPNDRSDVEKGGKIIMPPSALDQLSRLNITYPMLFKLTNKNSDRMTHCGVLEFVADEGICYLPHWMMQNLLLEEGGLVQVESVNLQVATYSKFQPQSPDFLDITNPKAVLENALRNFACMTTGDVIAINYNEKIYELRVMETKPDKAVSIIECDMNVDFDAPLGYKEPKRPVQHEESIEGEADHSGYAGEVGFRAFSGSGNRLDGKKKGVEPSPSPIKPGDIKRGIPNYEFKLGKITFIRNSRPLVKKVEEDEAGGRFVAFSGEGQSLRKKGRKP

SEQ ID NO: 1441 - protein, 388 aa, Mus musculus
MHLFAEATTKFTLELYRQLRESDNNIFFYSPISMMTALAMLQLGAKGNTEKQIEKVLQFNETTKKTTEKSAHCHDEENVHEQFQKLMTQLNKSNDAYDLKAANSIYGAKGFPFVQTFLEDIKEYYQANVESLDFEHAAEESEKKINSWVESQTNGKIKDLFPNGSLNRSTIMVLVNAVYFKGQWNHKFDEKHTTEEKFWLNKNTSKPVQMMKQNIEFNFMFLEDVQAKIVEIPYKGKELSMIVLLPVEINGLKQLEEQLTADKLLEWTRAENMHMTELYLSLPRFKVDEKYDLPIPLEHMGMVDAFDPQKADFSGMSSTQGLVVSKVLHKSFVEVNEEGTEAAAATGVEVSLTSAQIAEDFCCDHPFLFFIIHRKTSSILFFGRISSP

SEQ ID NO: 1442 - protein, 307 aa, Mus musculus; identical to SEQ ID NO: 1440

SEQ ID NO: 1443 - protein, 378 aa, Mus musculus
MDPLQEANGTFALNLLKILGEDSSKNVFLSPMSISSALAMVFMGAKGTTASQMAQALALDKCSGNGGGDVHQGFQSLLTEVNKTGTQYLLRTANRLFGDKTCDLLASFKDSCLKFYEAELEELDFQGATEESRQHINTWVAKKTEDKIKEVLSPGTVNSDTSLVLVNAIYFKGNWEKQFNKEHTREMPFKVSKNEEKPVQMMFKKSTFKMTYIGEIFTKILLLPYVSSELNMIIMLPDEHVELSTVEKEVTYEKFIEWTRLDKMDEEEVEVFLPKFKLEENYNMNDALYKLGMTDAFGGRADFSGMSSKQGLFLSKVVHKAFVEVNEEGTEAAAATAGMMTVRCMRFTPRFCADHPFLFFIHHVKTNGILFCGRFSSP

SEQ ID NO: 1444 - protein, 614 aa, Mus musculus
MSSYSSDRDRGRDRGFGAPRFGGSRTGPLSGKKFGNPGEKLVKKKWNLDELPKFEKNFYQEHPDLARRTAQEVDTYRRSKEITVRGHNCPKPVLNFYEANFPANVMDVIARHNFTEPTAIQAQGWPVALSGLDMVGVAQTGSGKTLSYLLPAIVHINHHPFLERGDGPICLVLAPTRELAQQVQQVAAEYCRACRLKSTCIYGGAPKGPQIRDLERGVEICIATPGRLIDFLECGKTNLRRTTYLVLDEADRMLDMGFEPQIRKIVDQIRPDRQTLMWSATWPKEVRQLAEDFLKDYIHINIGALELSANHNILQIVDVCHDVEKDEKLIRLMEEIMSEKENKTIVFVETKRRCDELTRKMRRDGWPAMGIHGDKSQQERDWVLNEFKHGKAPILIATDVASRGLDVEDVKFVINYDYPNSSEDYIHRIGRTARSTKTGTAYTFFTPNNIKQVSDLISVLREANQAINPKLLQLVEDRGSGRSRGRGGMKDDRRDRYSAGKRGGFNTFRDRENYDRGYSNLLKRDFGAKTQNGVYSAANYTNGSFGSNFVSAGIQTSFRTGNPTGTYQNGYDSTQQYGSNVANMHNGMNQQAYAYPVPQPAPMIGYPMPTGYSQ

SEQ ID NO: 1445 - protein, 415 aa, Mus musculus
MEELSMANTMFALNLLKQIEKSNSTQNIFISPWSISSTLAIVLLGAGGNTEQQMAKVLQFNEIGSYGITTRNPENFSGCDFAQQIQKENYPSAILQAQAGDKIHSAFSSLSSTINTPQGDYLLESANKLFGEKSARFKEEYIQLSKKYYSTEPEAVDFLECAEEAREKINSWVKTQTKGEIPNLLPEGSVDEDTKMVLVNAVYFKGKWKTPFEKKLNGLYPFRVNSHESIPVQMMFLHAKLNIGYIKDLKTQILELPHTGNISMLLLLPDEIEDASTGLELLESEINFANFNKWISKDTLDEDDVVVYIPKFKLAQSYELKSILQSMGMEDAFNKGKANFSGMSERNDLFLSEVFHQASVDVTEEGTVAAGGTGAVMTGRTGHGGPQFVADHPFLFFIMDKITHTILFVGRFSSP

SEQ ID NO: 1446 - protein, 795 aa, Mus musculus
MGTLGKAREAPRKPCHGSRAGPKARLEAKSTNSPLPAQPSLAQITQFRMMVSLGHLAKGASLDDLIDSCIQSFDADGNLCRNNQLLQVMLTMHRIIISSAELLQKVMNLYKDALEKNSPGVCLKICYFVRYWITEFWIMFKMDASLTSTMEEFQDLVKANGEETHCHLIDTTQINSRDWSRKLTQRIKSNTSKKRKVSLLFDHLEPEELSEHLTYLEFKSFRRISFSDYQNYLVNSCVKENPTMERSIALCNGISQWVQLMVLSRPTPQLRAEVFIKFIHVAQKLHQLQNFNTLMAVIGGLCHSSISRLKETSSHVPHEINKVLGEMTELLSSCRNYDNYRRAYGECTHFKIPILGVHLKDLISLYEAMPDYLEDGKVNVQKLLALYNHINELVQLQEMAPPLDANKDLVHLLTLSLDLYYTEDEIYELSYAREPRNHRAPPLTPSKPPVVVDWASGVSPKPDPKTISKHVQRMVDSVFKNYDLDQDGYISQEEFEKIAASFPFSFCVMDKDREGLISRDEITAYFMRASSIYSKLGLGFPHNFQETTYLKPTFCDNCAGFLWGVIKQGYRCKDCGMNCHKQCKDLVVFECKKRIKSPAISTENISSVVPMSTLCPLGTKDLLHAPEEGSFIFQNGEIVDHSEESKDRTIMLLGVSSQKISVRLKRTVAHKSTQTESFPWVGGETTPGHFVLSSPRKSAQGALYVHSPASPCPSPALVRKRAFVKWENKESLIKPKPELHLRLRTYQELEQEINTLKADNDALKIQLKYAQKKIESLQLGKSNHVLAQMDHGDSA

SEQ ID NO: 1447 - protein, 631 aa, Mus musculus
MDSVNNLCRHYEEKVRPCIDLIDTLRALGVEQDLALPAIAVIGDQSSGKSSVLEALSGVALPRGSGIVTRCPLVLKLRKLKEGEEWRGKVSYDDIEVELSDPSEVEEAINKGQNFIAGVGLGISDKLISLDVSSPNVPDLTLIDLPGITRVAVGNQPADIGRQIKRLIKTYIQKQETINLVVVPSNVDIATTEALSMAQEVDPEGDRTIGVLTKPDLVDRGAEGKVLDVMRNLVYPLKKGYMIVKCRGQQDIQEQLSLTEAFQKEQVFFKDHSYFSILLEDGKATVPCLAERLTEELTSHICKSLPLLEDQINSSHQSASEELQKYGADIPEDDRTRMSFLVNKISAFNRNIMNLIQAQETVSEGDSRLFTKLRNEFLAWDDHIEEYFKKDSPEVQSKMKEFENQYRGRELPGFVDYKAFESIIKKRVKALEESAVNMLRRVTKMVQTAFVKILSNDFGDFLNLCCTAKSKIKEIRLNQEKEAENLIRLHFQMEQIVYCQDQVYKETLKTIREKEAEKEKTKALINPATFQNNSQFPQKGLTTTEMTQHLKAYYQECRRNIGRQIPLIIQYFILKTFGEEIEKMMLQLLQDTSKCSWFLEEQSDTREKKKFLKRRLLRLDEARQKLAKFSD

SEQ ID NO: 1448 - protein, 324 aa, Mus musculus
MWPLAAALLLGSCCCGSAQLLFSNVNSIEFTSCNETVVIPCIVRNVEAQSTEEMFVKWKLNKSYIFIYDGNKNSTTTDQNFTSAKISVSDLINGIASLKMDKRDAMVGNYTCEVTELSREGKTVIELKNRTAFNTDQGSACSYEEEKGGCKLVSWFSPNEKILIVIFPILAILLFWGKFGILTLKYKSSHTNKRIILLLVAGLVLTVIVVVGAILLIPGEKPVKNASGLGLIVISTGILILLQYNVFMTAFGMTSFTIAILITQVLGYVLALVGLCLCIMACEPVHGPLLISGLGIIALAELLGLVYMKFVASNQRTIQPPRNR

SEQ ID NO: 1449 - protein, 655 aa, Mus musculus
MVLSTEENTGVDSVNLPSGETGLGEKDQESVNNLCSQYEEKVRPCIDLIDSLRALGVEQDLALPAIAVIGDQSSGKSSVLEALSGVALPRGSGIVTRCPLVLKLRKLNEGEEWRGKVSYDDIEVELSDPSEVEEAINKGQNFIAGVGLGISDKLISLDVSSPNVPDLTLIDLPGITRVAVGNQPADIGRQIKRLIKTYIQKQETINLVVVPSNVDIATTEALSMAQEVDPEGDRTIGILTKPDLVDRGTEDKVVDVVRNLVYHLKKGYMIVKCRGQQDIQEQLSLTEALQNEQIFFKEHPHFRVLLEDGKATVPCLAERLTAELILHICKSLPLLENQIKESHQSASEELQKYGMDIPEDDSEKTFFLIEKINAFNQDITALVQGEENVAEGECRLFTRLRKEFLSWSKEIEKNFAKGYAVLYNEVWAFEKQYRGRELPGFVNYKTFENIIRRQIKTLEEPAIEMLHTVTEIVRAAFTSVSEKNFSEFYNLHRTTKSKLEDIRLEQEKEAEMSIRLHFKMEQIIYCQDQIYRGALQKVREEEAEEEKKTKHGTSSSSQSQDLQTSSMAEIFQHLNAYRQEAHNRISSHVPLIIQYFILKMFAERLQKGMLQLLQDKDSCSWLLKEQSDTSEKRKFLKERLARLAQARRRLAKFPG

SEQ ID NO: 1450 - protein, 469 aa, Mus musculus
MATCSRQFTSSSSMKGSCGIGGGSSRMSSILAGGSCRAPSTCGGMSVTSSRFSSGGVCGIGGGYGGSFSSSSFGGGLGSGFGGRFDGFGGGFGAGLGGGLGGGIGDGLLVGSEKVTMQNLNDRLATYLDKVRALEEANRDLEVKIRDWYQRQRPTEIKDYSPYFKTIEDLKSKIIIATQENAQFTLQIDNARLAADDFRTKYENELFLRQSVEGDINGLRKVLDELTLSRADLEMQIENLREELAFLKKNHEEEMLALRGQTGGDVNVEMDAAPGVDLSRILNEMRDQYEQMAEKNRRDVEAWFLRKTEELNKEVASNSDLIQSNRSEVAELRRVFQGLEIELQSQLSMKASLENSLEETKGRYCMQLSQIQGLISSVEEQLAQLRCEMEQQSQEYNILLDVKTRLEQEIATYRRLLDGENIHSSSQHSSGQSYSSREVFSSSSRQPRSILKEQGSTSFSQSQSQSSRD

SEQ ID NO: 1451 - protein, 749 aa, Mus musculus
MSQWFELQQLDSKFLEQVHQLYDDSFPMEIRQYLAQWLEKQDWEHAAYDVSFATIRFHDLLSQLDDQYSRFSLENNFLLQHNIRKSKRNLQDNFQEDPVQMSMIIYNCLKEERKILENAQRFNQAQEGNIQNTVMLDKQKELDSKVRNVKDQVMCIEQEIKTLEELQDEYDFKCKTSQNREGEANGVAKSDQKQEQLLLHKMFLMLDNKRKEIIHKIRELLNSIELTQNTLINDELVEWKRRQQSACIGGPPNACLDQLQTWFTIVAETLQQIRQQLKKLEELEQKFTYEPDPITKNKQVLSDRTFLLFQQLIQSSFVVERQPCMPTHPQRPLVLKTGVQFTVKSRLLVKLQESNLLTKVKCHFDKDVNEKNTVKGFRKFNILGTHTKVMNMEESTNGSLAAELRHLQLKEQKNAGNRTNEGPLIVTEELHSLSFETQLCQPGLVIDLETTSLPVVVISNVSQLPSGWASILWYNMLVTEPRNLSFFLNPPCAWWSQLSEVLSWQFSSVTKRGLNADQLSMLGEKLLGPNAGPDGLIPWTRFCKENINDKNFSFWPWIDTILELIKNDLLCLWNDGCIMGFISKERERALLKDQQPGTFLLRFSESSREGAITFTWVERSQNGGEPDFHAVEPYTKKELSAVTFPDIIRNYKVMAAENIPENPLKYLYPNIDKDHAFGKYYSRPKEAPEPMELDDPKRTGYIKTELISVSEVHPSRLQTTDNLLPMSPEEFDEMSRIVGPEFDSMMSTV

SEQ ID NO: 1452 - protein, 321 aa, Mus musculus
MRLGPRPAALGLLLPLLLYAAVAGASKAEELHYPQGEHRADYDREALLGVQEDVDEYVKLGHEEQQRRLQSIIKKIDSDSDGFLTENELSQWIQMSFKHYAMQEAKQQFVEYDKNSDGDPVTWDEYNIQMYDRVIDFDENTALDDTEEGSFRQLHLKDKKRFEKANQDSGPGLSLEEFIAFEHPEEVDYMTEFVIQEALEEHDKNGDGFVSLEEFLGDYRRDPTANEDPEWILVEKDRFVNDYDKDNDGRLDPQELLSWVVPNNQGIAQEEALHLIDEMDLNSDKKLSEEEILENQDLFLTSDQTDYGRQLHDDYFYHDEL

SEQ ID NO: 1453 - protein, 220 aa, Mus musculus
MAAVDIRDNLLGISWVDSSWIPILNSGSVLDYFSERSNPFYDRTCYNEVVKMQRLTLEHLNQMVGIEYILLHAQEPILFIIRKQQRQSPAQVIPLADYYIIAGVIYQAPDLGSVINSRVLTAVHGIQSAFDEAMSYCRYHPSKGYWWHFKDHEEQEKVKPKAKRKEEPSSIFQRQRVDALLIDLRQKFPPRFVQQKSGEKPVPVDQAKKRGRAFARNCKI

SEQ ID NO: 1454 - protein, 457 aa, Mus musculus
MAEVRGVQRVLFGDWLLGEVSSGQYEGLQWLNEARTVFRVPWKHFGRRDLDEEDAQIFKAWAVARGRWPPSGVNLPPPEAEAAERRERRGWKTNFRCALHSTGRFILRQDNSGDPVDPHKVYELSRELGSTVGPATENREEVSLSNALPTQGVSPGSFLARENAGLQTPSPLLSSDAGDLLLQVLQYSHILESESGADPVPPQAPGQEQDRVYEEPYAAWQVEAVPSPRPQQPALTERSLGFLDVTIMYKGRTVLQAVVGHPRCVFLYSPMAPAVRTSEPQPVIFPSPAELPDQKQLHYTETLLQHVSPGLQLELRGPSLWALRMGKCKVYWEVGSPMGTTGPSTPPQLLERNRHTPIFDFSTFFRELEEFRARRRQGSPHYTIYLGFGQDLSAGRPKEKTLILVKLEPWVCKAYLEGVQREGVSSLDSSSLGLCLSSTNSLYEDIEHFLMDLGQWP

SEQ ID NO: 1455 - protein, 462 aa, Mus musculus
MQLRKMQTIKKEPAPLDPTSSSDKMLLLNSALAEVAEDLASGEDLLLNEGSMGKNKSSACRRKREFIPDEKKDAMYWEKRRKNNEAAKRSREKRRLNDLVLENKLIALGEENATLKAELLSLKLKFGLISSTAYAQEIQKLSNSTAVYFQDYQTSKAAVSSFVDEHEPAMVAGSCISVIKHSPQSSLSDVSEVSSVEHTQESPAQGGCRSPENKFPVIKQEPVELESFAREAREERGTYSTSIYQSYMGSSFSTYSHSPPLLQVHGSTSNSPRTSEADEGVVGKSSDGEDEQQVPKGPIHSPVELQRVHATVVKVPEVNPSALPHKLRIKAKAMQVKVEALDSEFEGMQKLSSPADAIAKRHFDLEKHGTSGMAHSSLPPFSVQVTNIQDWSLKSEHWHHKELSSKTQSSFKTGVVEVKDGGYKVSEAENLYLKQGIANLSAEVVSLKRFIATQPISASDSR

SEQ ID NO: 1456 - protein, 780 aa, Mus musculus; identical to SEQ ID NO: 14

SEQ ID NO: 1457 - protein, 525 aa, Mus musculus
MSLAEAIRLWNEGVLAADKKDWKGALEAFSEVQDPHSRICFNIGCVNTILENLQAAEQAFTKSINRDKHSAVAYFQRGMLYYRMEKYDLAIKDLKEALTQLRGNQLIDYKILGLQFKLFACEVLYNIALMHAKKEEWKKAEEQLALATNMKSEPRHSKIDKAMESIWKQKLFEPVVIPVGRLFRPNERQVAQLAKKDYLGKATVVASVVHQDNFSGFAPLQPQSAEPPPRPKTPEIFRALEGEAHRVLFGFVPETPEELQVMPGNIVFVLKKGSDNWATVMFNGQKGLVPCNYLEPVELRIHPQSQPQEDTSPESDIPPPPNSSPPGRLQLSPGHKQKEPKELKLSVPMPYMLKVHYKYTVVMETRLGLPYSQLRNMVSKKLALSPEHTKLSYRRRDSHELLLLSEESMKDAWGQVKNYCLTLWCEHTVGDQGLIDEPIQRENSDASKQTTEPQPKEGTQVVAIFSYEAAQPEDLEFVEGDVILVLSHVNEEWLEGECKGKVGIFPKAFVEGCAAKNLEGIPREV

SEQ ID NO: 1458 - protein, 790 aa, Mus musculus; identical to SEQ ID NO: 1378

SEQ ID NO: 1459 - protein, 117 aa, Mus musculus
MATYSLANERLRALEDIEREIGAILQNAGTAILELSKEKTNERLLDRQAAAFTTSVQHVEAELSAQIRYLTQVATGQPHEGSSYSSRKDCQMALKRVDYARLKISDVVRTCEQMLEN

SEQ ID NO: 1460 - protein, 246 aa, Mus musculus
MRRGFGPLSLAFFLFLLALLTLPGDGNQGSVAGSCSCDRTISSGTQIPQGTLDHIRKYLKAFHRCPFFIRFQLQSKSVCGGSQDQWVRELVDCFERKECGTGHGKSFHHQKHLPQASTQTPEAAEGTPSDTSTPAHSQSTQHSTLPSGALSLNKEHTQPWEMTTLPSGYGLEARPEAEANEKQQDDRQQEAPGAGASTPAWVPVLSLLAIVFFLTAAMAYVLCNRRATQQNSAGLQLWYTPVEPRP

SEQ ID NO: 1461 - protein, 671 aa, Mus musculus
MAAAGVVSGKIIYEQEGVYIHSSCGKANDQDSLISGILRVLEKDAEVIVDWRPLDDALDSSSILCAGKDSSSVVEWTQAPKERAHRGSDQQSSYEAEWDMVTTVSFKKKPHTNGDAPGHRNGKSKWSFLFSLADLKSVKQSKEGMGWSYLVFCLKDDVMLPALHFHQGDSKLLIESLEKYVVLCESPQDSRTLLVNCQNKSLSQSFENLLDEPAYGLIQKIKKDPYTATMVGFSKVTNYIFDSLRGSDPSTHQRPPSEMADFLSDAIPGLKINQQEEPGFEVITRIDLGERPVVQRREPVSLEEWNKSLDPEGRLVAVESMKQKIFRGGLSHSLRKQAWKFLLGYFPWDSTKEERTQLQKQKTDEYFRMKLQWKSVSEAQEKRNSRLRDYRSLIEKDVNRTDRTNKFYEGQDNPGLILLHDILMTYCMYDFDLGYVQGMSDLLSPLLYVMENEVDAFWCFASYMDQMHQNFEEQMQGMKTQLIQLSTLLRLLDSGFCSYLESQDSGYLYFCFRWLLIRFKREFSFLDILRLWEVMWTELPCKNFHLLLCCAILESEKQQIMAKHYGFNEILKHINELSMKIDVEDILCKAEAISLQMAQCKELPQAVCEILGLQDSEITTPDSDTDENVGSPCPVSAFPSSTLPILAASEAKDDSPTQTLASPNACRLTPA

SEQ ID NO: 1462 - protein, 655 aa, Mus musculus
MMKFTVVAAALLLLGAVRAEEEDKKEDVGTVVGIDLGTTYSCFGVFKNGRVEIIANDQGNRITPSYVAFTPEGERLIGDAAKNQLTSNPENTVFDAKRLIGRTWNDPSVQQDIKFLPFKVVEKKTKPYIQVDIGGGQTKTFAPEEISAMVLTKMKETAEAYLGKKVTHAVVTVPAYFNDAQRQATKDAGTIAGLNVMRIINEPTAAAIAYGLDKREGEKNILVFDLGGGTFDVSLLTIDNGVFEWVATNGDTHLGGEDFDQRVMEHFIKLYKKKTGKDVRKDNRAVQKLRREVEKAKRALSSQHQARIEIESFFEGEDFSETLTRAKFGELNMDLFRSTMKPVQKVLEDSDLKKSDIDEIALVGGSTRIPKIQQLVKEFFNGKEPSRGINPDEAVAYGAAVQAGVLSGDQDTGDLVLLDVCPLTLGIETVGGVMTKLIPRNTVVPTKKSQIFSTASDNQPTVTIKVYEGERPLTKDNHLLGTFDLTGIPPAPRGVPQIEVTFEIDVNGILRVTAEDKGTGNKNKITITNDQNRLTPEEIERMVNDAEKFAEEDKKLKERIDTRNELESYAYSLKNQIGDKEKLGGKLSSEDKETMEKAVEEKIEWLESHQDADIEDFKAKKKELEEIVQPIISKLYGSGGPPPTGEEDTSEKDEL

SEQ ID NO: 1463 - protein, 449 aa, Mus musculus
MGGVGEPGGGPGPREGPAPLGAPLPIFRWEQIRQHDLPGDKWLVIERRVYDISRWAQRHPGGSRLIGHHGAEDATDAFHAFHQDLHFVRKFLKPLLIGELAPEEPSQDGAQNAQLIEDFRALRQAAEDMKLFEADTTFFALLLGHILAMELLAWLIIYLLGPGWVSSILAALILAISQAQCWCLQHDLGHASIFTKSRWNHVAQRFVMGQLKGFSAHWWNFRHFQHHAKPNIFHKDPDVTVAPVFLLGESSVEYGKKKRRYLPYNHQHLYFFLIGPPLLTLVNFEVENLAYMLVCMQWTDLLWAASFYSRFFLSYSPFYGATGTLLLFVAVRVLESHWFVWITQMNHIPKEIGHEKHRDWASSQLAATCNVEPSLFIDWFSGHLNFQIEHHLFPTMPRHNYRRVAPLVKAFCAKHGLHYEVKPFLTALVDIIGSLKKSGDIWLDAYLHQ

SEQ ID NO: 1464 - protein, 1144 aa, Mus musculus; identical to SEQ ID NO: 1388

SEQ ID NO: 1465 - protein, 1025 aa, Mus musculus
MSIVCSAEDSFRNLILFFRPRLKMYIQVEPVLDHLIFLSAETKEQILKKINTCGNTSAAELLLSTLEQGQWPLGWTQMFVEALEHSGNPLAARYVKPTLTDLPSPSSETAHDECLHLLTLLQPTLVDKLLINDVLDTCFEKGLLTVEDRNRISAAGNSGNESGVRELLRRIVQKENWFSTFLDVLRQTGNDALFQELTGGGCPEDNTDLANSSHRDGPAANECLLPAVDESSLETEAWNVDDILPEASCTDSSVTTESDTSLAEGSVSCFDESLGHNSNMGRDSGTMGSDSDESVIQTKRVSPEPELQLRPYQMEVAQPALDGKNIIICLPTGSGKTRVAVYITKDHLDKKKQASESGKVIVLVNKVMLAEQLFRKEFNPYLKKWYRIIGLSGDTQLKISFPEVVKSYDVIISTAQILENSLLNLESGDDDGVQLSDFSLIIIDECHHTNKEAVYNNIMRRYLKQKLRNNDLKKQNKPAIPLPQILGLTASPGVGAAKKQSEAEKHILNICANLDAFTIKTVKENLGQLKHQIKEPCKKFVIADDTRENPFKEKLLEIMASIQTYCQKSPMSDFGTQHYEQWAIQMEKKAAKDGNRKDRVCAEHLRKYNEALQINDTIRMIDAYSHLEAFYTDEKEKKFAVLNDSDKSDDEASSCNDQLKGDVKKSLKLDETDEFLMNLFFDNKKMLKKLAENPKYENEKLIKLRNTILEQFTRSEESSRGIIFTKTRQSTYALSQWIMENAKFAEVGVKAHHLIGAGHSSEVKPMTQTEQKEVISKFRTGEINLLIATTVAEEGLDIKECNIVIRYGLVTNEIAMVQARGRARADESTYVLVTSSGSGVTEREIVNDFREKMMYKAINRVQNMKPEEYAHKILELQVQSILEKKMKVKRSIAKQYNDNPSLITLLCKNCSMLVCSGENIHVIEKMHHVNMTPEFKGLYIVRENKALQKKFADYQTNGEIICKCGQAWGTMMVHKGLDLPCLKIRNFVVNFKNNSPKKQYKKWVELPIRFPDLDYSEYCLYSDED

SEQ ID NO: 1466 - protein, 554 aa, Mus musculus
MPVQLTTALRVVGTSLFALVVLGGILAAYVTGYQFIHTEKHYLSFGLYGAILGLHLLIQSLFAFLEHRRMRRAGRPLKLHCSQRSRSVALCIAAYQEDPEYLRKCLRSAQRIAFPNLKVVMVVDGNRQEDTYMLDIFHEVLGGTEQAGFFVWRSNFHEAGEGETEASLQEGMERVRAVVWASTFSCIMQKWGGKREVMYTAFKALGNSVDYIQVCDSDTVLDPACTIEMLRVLEEDPQVGGVGGDVQILNKYDSWISFLSSVRYWMAFNVERACQSYFGCVQCISGPLGMYRNSLLQQFLEDWYHQKFLGSKCSFGDDRHLTNRVLSLGYRTKYTARSKCLTETPTRYLRWLNQQTRWSKSYFREWLYNSLWFHKHHLWMTYESVVTGFFPFFLIATVIQLFYRGRIWNILLFLLTVQLVGIIKATYACFLRGNAEMIFMSLYSLLYMSSLLPAKIFAIATINKSGWGTSGRKTIVVNFIGLIPVSIWVAVLLGGLAYTAYCQDLFSETELAFLVSGAILYGCYWVALLMLYLAIIARRCGKKPEQYSLAFAEV

SEQ ID NO: 1467 - protein, 105 aa, Mus musculus
MSVYFPIHCSDYLRSAEMTEVMMNAPSMEEIGLSPRKDGLSYQIFPDPSDFDRCCKLKDRLPSIVVEPTEGEVESGELRWPPEEFLVQEDEQDNCEETTNEKKDQ

SEQ ID NO: 1468 - protein, 503 aa, Mus musculus
MEAAAAAPRRPQLLIVLVAAATLLPGAKALQCFCHLCTKDNFTCETDGLCFVSVTETTDKVIHNSMCIAEIDLIPRDRPFVCAPSSKTGAVTTTYCCNQDHCNKIELPTTGPFSEKQSAGLGPVELAAVIAGPVCFVCIALMLMVYICHNRTVIHHRVPNEEDPSLDRPFISEGTTLKDLIYDMTTSGSGSGLPLLVQRTIARTIVLQESIGKGRFGEVWRGKWRGEEVAVKIFSSREERSWFREAEIYQTVMLRHENILGFIAADNKDNGTWTQLWLVSDYHEHGSLFDYLNRYTVTVEGMIKLALSTASGLAHLHMEIVGTQGKPAIAHRDLKSKNILVKKNGTCCIADLGLAVRHDSATDTIDIAPNHRVGTKRYMAPEVLDDSINMKHFESFKRADIYAMGLVFWEIARRCSIGGIHEDYQLPYYDLVPSDPSVEEMRKVVCEQKLRPNIPNRWQSCEALRVMAKIMRECWYANGAARLTALRIKKTLSQLSQQEGIKM

SEQ ID NO: 1469 - protein, 589 aa, Mus musculus
MASEIHMSEPMCLIENTEAQLVINQEALRILSAITQPVVVVAIVGLYRTGKSYLMNKLAGKRTGFSLGSTVQSHTKGIWMWCVPHPKKAGQTLVLLDTEGLEDVEKGDNQNDCWIFALAVLLSSTFIYNSIGTINQQAMDQLHYVTELTDLIKSKSSPDQSDVDNSANFVGFFPIFVWTLRDFSLDLEFDGESITPDEYLETSLALRKGTDENTKKFNMPRLCIRKFFPKRKCFIFDRPGDRKQLSKLEWIQEDQLNKEFVEQVAEFTSYIFSYSGVKTLSGGITVNGPRLKSLVQTYVSAICSGELPCMENAVLTLAQIENSAAVQKAITYYEEQMNQKIHMPTETLQELLDLHRTCEREAIEVFMKNSFKDVDQKFQEELGAQLEAKRDAFVKKNMDMSSAHCSDLLEGLFAHLEEEVKQGTFYKPGGYYLFLQRKQELEKKYIQTPGKGLQAEVMLRKYFESKEDLADTLLKMDQSLTEKEKQIEMERIKAEAAEAANRALAEMQKKHEMLMEQKEQSYQEHMKQLTEKMEQERKELMAEQQRIISLKLQEQERLLKQGFQNESLQLRQEIEKIKNMPPPRSCTIL

SEQ ID NO: 1470 - protein, 795 aa, Mus musculus; identical to SEQ ID NO: 1409

SEQ ID NO: 1471 - protein, 388 aa, Mus musculus
MWWCCVLFVVECPRGLLPRPCRVLVLLNPQGGKGKALQLFQSRVQPFLEEAEITFKLILTERKNHARELVCAEELGHWDALAVMSGDGLMHEVVNGLMERPDWETAIQKPLCSLPGGSGNALAASVNHYAGYEQVTNEDLLINCTLLLCRRRLSPMNLLSLHTASGLRLYSVLSLSWGFVADVDLESEKYRRLGEIRFTVGTFFRLASLRIYQGQLAYLPVGTVASKRPASTLVQKGPVDTHLVPLEEPVPSHWTVVPEQDFVLVLVLLHTHLSSELFAAPMGRCEAGVMHLFYVRAGVSRAALLRLFLAMQKGKHMELDCPYLVHVPVVAFRLEPRSQRGVFSVDGELMVCEAVQGQVHPNYLWMVCGSRDAPSGRDSRRGPPPEEP

SEQ ID NO: 1472 - protein, 196 aa, Mus musculus
MADGQLPFPCSYPSRLRRDPFRDSPLSSRLLDDGFGMDPFPDDLTAPWPEWALPRLSSAWPGTLRSGMVPRGPPATARFGVPAEGRSPPPFPGEPWKVCVNVHSFKPEELMVKTKDGYVEVSGKHEEKQQEGGIVSKNFTKKIQLPAEVDPATVFASLSPEGLLIIEAPQVPPYSPFGESSFNNELPQDNQEVTCS

SEQ ID NO: 1473 - protein, 211 aa, Mus musculus
MANAGLQLLGFILASLGWIGSIVSTALPQWKIYSYAGDNIVTAQAIYEGLWMSCVSQSTGQIQCKVFDSLLNLNSTLQATRALMVIGILLGLIAIFVSTIGMKCMRCLEDDEVQKMWMAVIGGIIFLISGLATLVATAWYGNRIVQEFYDPLTPINARYEFGQALFTGWAAASLCLLGGVLLSCSCPRKTTSYPTPRPYPKPTPSSGKDYV

SEQ ID NO: 1474 - protein, 530 aa, Mus musculus
MARAAVLPPSRLSPTLPLLPLLLLLLQETGAQDVRVRVLPEVRGRLGGTVELPCHLLPPTTERVSQVTWQRLDGTVVAAFHPSFGVDFPNSQFSKDRLSFVRARPETNADLRDATLAFRGLRVEDEGNYTCEFATFPNGTRRGVTWLRVIAQPENHAEAQEVTIGPQSVAVARCVSTGGRPPARITWISSLGGEAKDTQEPGIQAGTVTIISRYSLVPVGRADGVKVTCRVEHESFEEPILLPVTLSVRYPPEVSISGYDDNWYLGRSEAILTCDVRSNPEPTDYDWSTTSGVFPASAVAQGSQLLVHSVDRMVNTTFICTATNAVGTGRAEQVILVRESPSTAGAGATGGIIGGIIAAIIATAVAGTGILICRQQRKEQRLQAADEEEELEGPPSYKPPTPKAKLEEPEMPSQLFTLGASEHSPVKTPYFDAGVSCADQEMPRYHELPTLEERSGPLLLGATGLGPSLLVPPGPNVVEGVSLSLEDEEEDDEEEDFLDKINPIYDALSYPSPSDSYQSKDFFVSRAMYV

SEQ ID NO: 1475 - protein, 830 aa, Mus musculus
MAYYMDTWAAAPAERPANNSLEEHYRWQIPIKHNVFEILKSNESQLCEVLQNKFGCISTLSCPTLAGSSSPAQRVFRRTLIPGIELSVWKDDLTRHVVDAVVNAANENLLHGSGLAGSLVKTGGFEIQEESKRIIANVGKISVGGIAITGAGRLPCHLIIHAVGPRWTVTNSQTAIELLKFAIRNILDYVTKYDLRIKTVAIPALSSGIFQFPLDLCTSIILETIRLYFQDKQMFGNLREIHLVSNEDPTVASFKSASESILGRDLSSWGGPETDPASTMTLRIGRGLTLQIVQGCIEMQTTDVIVNSGYMQDFKSGRVAQSILRQAGVEMEKELDKVNLSTDYQEVWVTKGFKLSCQYVFHVAWHSQINKYQILKDAMKSCLEKCLKPDINSISFPALGTGLMDLKKSTAAQIMFEEVFAFAKEHKEKTLTVKIVIFPVDVETYKIFYAEMTKRSNELNLSGNSGALALQWSSGEQRRGGLEAGSPAINLMGVKVGEMCEAQEWIERLLVSLDHHIIENNHILYLGKKEHDVLSELQTSTRVSISETVSPRTATLEIKGPQADLIDAVMRIECMLCDVQEEVAGKREKNLWSLSGQGTNQQEKLDKMEESYTFQRYPASLTQELQDRKKQFEKCGLWVVQVEQIDNKVLLAAFQEKKKMMEERTPKGSGSQRLFQQVPHQFCNTVCRVGFHRMYSTSYNPVYGAGIYFTKSLKNLADKVKKTSSTDKLIYVFEAEVLTGSFCQGNSSNIIPPPLSPGALDVNDSVVDNVSSPETIVVFNGMQAMPLYLWTCTQDRTFSQHPMWSQGYSSGPGMVSSLQSWEWVLNGSSV

SEQ ID NO: 1476 - protein, 594 aa, Mus musculus; identical to SEQ ID NO: 1401

SEQ ID NO: 1477 - protein, 138 aa, Mus musculus
MISLTDTQKIGMGLTGFGVFFLFFGMILFFDKALLAIGNVLFVAGLAFVIGLERTFRFFFQRHKVKATGFFLGGVFVVLIGWPLIGMIFEIYGFFLLFRGFFPVVVGFIRRVPVLGSLLNLPGIRSFVDKVGESNNMV

SEQ ID NO: 1478 - protein, 418 aa, Mus musculus
MGEDAAQAEKFQHPNTDMLQEKPSSPSPMPSSTPSPSLNLGSTEEAIRDNSQVNAVTVHTLLDKLVNMLDAVRENQHNMEQRQINLEGSVKGIQNDLTKLSKYQASTSNTVSKLLEKSRKVSAHTRAVRERLERQCVQVKRLENNHAQLLRRNHFKVLIFQEESEIPASVFVKEPVPSAAEGKEELADENKSLEETLHNVDLSSDDELPRDEEALEDSAEEKMEESRAEKIKRSSLKKVDSLKKAFSRQNIEKKMNKLGTKIVSVERREKIKKSLTPNHQKASSGKSSPFKVSPLSFGRKKVREGESSVENETKLEDQMQEDREEGSFTEGLSEASLPSGLMEGSAEDAEKSARRGNNSAVGSNADLTIEEDEEEEPVALQQAQQVRYESGYMLNSEEMEEPSEKQVQPAVLHVDQTA

SEQ ID NO: 1479 - protein, 677 aa, Mus musculus
MAQKKYLQAKLTQFLREDRIQLWKPPYTKENKEVGLAVKDLAKKYSERLECCENEVENIIEEIRRKAIERGTGNEHYRTTGIATIEVFLPPRLRKHDKKSLLETRLHVTGRDLRCQIAETFGFQENYIKIVINKKQLQLGKSLEEQGVTHNVKAMVLELKQSEEDVRKNLQLEEEEQNEAELKERRIQRTKRGLEILAERAEMVVDPETMPYLDIANQTGRSLRIPPAERKALMLAMGYHEKGRAFLKRKEYGIALPCLLDADRYFCECKELLDTVDNYAVLQLDIVWCYFRLEQLECLDDAEKKLNLAQKCFKNCYGENHQRLVHIKGNCGKEKVLFLRLYLLQGIQNYHSGNGEEAREYLNKARQLFKELYIDPSKVHNLLQLGFTAQEARLGLRACDGNVDHAATHISNRREELAQIRKEEKEKRRRRLENVNTLRGMGYSTQAAKQALHQARGNLDDALKVLLSNPHMWWLQDADPENNSRQASPSQESINQLVYMGFDTVVAEAALRVFGGNVQLAAQTLAHHGGSLPPDLQFSGEDSSPTPSTSPSDSAGTSSASTDEDMETEAVNEILEDIPEHEEDYLDSTLEDEEVIIAEYLSYVESISSARKEQLIRNKCYVSAIKFCGCKWLNASLRSSMLFNDFSLSRLPPQVQGPVFEETLSVRGQSRKGNVPA

SEQ ID NO: 1480 - protein, 235 aa, Mus musculus
MRPVATGIFKALVFIFSSLCAWYSGYLLAELIPDVPLSSTLYNIRSIGERPVLKAPAPKRQKCDHWSPCPPDTYAYRLLSGGGRDKYAKICFEDEVLIGEKTGNVARGINIAVVNYETGKVIATKYFDMYEGDNSGPMAKFIQSTPSKSLLFMVTHDDGSSKLKAQAKDAIEALGSKEIKNMKFRSSWVFVAAKGFELPSEIEREKINHSDQSRNRYAGWPAEIQIEGCIPKGLR

SEQ ID NO: 1481 - protein, 501 aa, Mus musculus
MEAASTWALLLALLLLLLLLSLTLFRTPARGYLPPGPTPLPLLGNLLQLRPGALYSGLLRLSKKYGPVFTVYLGPWRRVVVLVGHDAVREALGGQAEEFSGRGTLATLDKTFDGHGVFFANGERWKQLRKFTLLALRDLGMGKREGEELIQAEVQSLVEAFQKTEGRPFNPSMLLAQATSNVVCSLVFGIRLPYDDKEFQAVIQAASGTLLGISSPWGQAYEMFSWLLQPLPGPHTQLQHHLGTLAAFTIQQVQKHQGRFQTSGPARDVVDAFLLKMAQEKQDPGTEFTEKNLLMTVTYLLFAGTMTIGATIRYALLLLLRYPQVQQRVREELIQELGPGRAPSLSDRVRLPYTDAVLHEAQRLLALVPMGMPHTITRTTCFRGYTLPKGTEVFPLIGSILHDPAVFQNPGEFHPGRFLDEDGRLRKHEAFLPYSLGKRVCLGEGLARAELWLFFTSILQAFSLETPCPPGDLSLKPAISGLFNIPPDFQLRVWPTGDQSR

SEQ ID NO: 1482 - protein, 212 aa, Mus musculus; identical to SEQ ID NO: 1438

SEQ ID NO: 1483 - protein, 321 aa, Mus musculus; identical to SEQ ID NO: 1452

SEQ ID NO: 1484 - protein, 368 aa, Mus musculus
MGKGFGLLRKPCQSVVAEPQQYSALEEERTMKRKRVLSRDLCSAWDSPHGLVGLHNIGQTCCLNSLLQVFMMNMDFRMILKRITVPRSAEERKRSVPFQLLLLLEKMQDSRQKALLPTELVQCLQKYNVPLFVQHDAAQLYLTIWNLTKDQITDTDLTERLQGLFTIWTQESLICVGCTAESSRRSKLLTLSLPLFDKDAKPLKTLEDALRCFVQPKELASSDMCCETCGEKTPWKQVLKLTHLPQTLTIHLMRFSARNSRTEKICHSVNFPQSLDFSQVLPTEEDLGDTKEQSEIHYELFAVIAHVGMADFGHYCAYIRNPVDGKWFCFNDSHVCWVTWKDVQCTYGNHRYRWRETAYLLVYTKTGS

SEQ ID NO: 1485 - protein, 257 aa, Mus musculus
MVLCVQGSCPLLAVEQIGRRPLWAQSLELPGPAMQPLPTGAFPEEVTEETPVQAENEPKVLDPEGDLLCIAKTFSYLRESGWYWGSITASEARQHLQKMPEGTFLVRDSTHPSYLFTLSVKTTRGPTNVRIEYADSSFRLDSNCLSRPRILAFPDVVSLVQHYVASCAADTRSDSPDPAPTPALPMSKQDAPSDSVLPIPVATAVHLKLVQPFVRRSSARSLQHLCRLVINRLVADVDCLPLPRRMADYLRQYPFQL

SEQ ID NO: 1486 - protein, 535 aa, Mus musculus
MFSWLGNDDRRKKDPEVFQTVSDGLKKLYKTKLLPLEEYYRFHEFHSPALEDADFDNKPMVLLVGQYSTGKTTFIRYLLEQDFPGMRIGPEPTTDSFIAVMQGDVEGIIPGNALVVDPKKPFRKLNAFGNAFLNRFVCAQLPNAVLESISVIDTPGILSGEKQRISRGYDFAAVLEWFAERVDRIILLFDAHKLDISDEFSEVIKALKNHEDKMRVVLNKADQIETQQLMRVYGALMWSLGKIVNTPEVIRVYIGSFWSHPLLIPDNRKLFEAEEQDLFRDIQSLPRNAALRKLNDLIKRARLAKVHAYIISSLKKEMPSVFGKDTKKKELVNNLAEIYGRIEREHQISPGDFPNLKKMQDQLQAQDFSKFQPLKSKLLEVVDDMLAHDIAQLMVLVRQEETQRPVQMVKGGAFEGTLQGPFGHGYGEGAGEGIDDAEWVVARDKPMYDEIFYTLSPVDGKITGANAKKEMVRSKLPNSVLGKIWKLADIDKDGMLDDEEFALANHLIKVKLEGHELPSELPAHLLPPYKRKVSE

SEQ ID NO: 1487 - protein, 107 aa, Mus musculus
MRLPCEVEVRSCHLPTLGLKSRGKGVRAVVSLCQAPGRNELQPEARAEPGGHACLLVSTMKDRQGTSYKLRENIEQLFTKFVDEGKATVRLKEPPVDICLSKDSIWP

SEQ ID NO: 1488 - protein, 422 aa, Mus musculus
MNSSHSFNQTYSASVHSLGSTRGRQGSCHRAPSVHGGAGGVRISLSFTTPGCLPPGGSWGSGRSSPLLGGNGKATMQNLNDRLATYLEKVRALEEANSKLETRILRWHQEREPSHRKDYSQYEENISRLQEQIVDGKMANAHIVVLIDNARMAVDDFNLKFENEHSLKKDLEIEVEGLRKTLDDLTIVTTDLEQEVEGMRKELILMKKRHEQEMEENHLPSDFKVSVKVDTTPGEDLIKVLEDMRQEYELIIKKKHQELDTWFREQSAAMAQEVASPAPVQGNQSDIHELRRTFQALEIDLQAQHSRKTALENMLTETRARYSCRLQDMQQIISHYEEELIQLRQDLERQNNEHKVLLGIKTHLEKEIATYRRLLEGDTEGTMDGSESRLKGSEASTIKAITQESVNGRIVLSQVNEIQKHI

SEQ ID NO: 1489 - protein, 457 aa, Mus musculus; identical to SEQ ID NO: 1454

SEQ ID NO: 1490 - protein, 474 aa, Mus musculus
MAVSDALLPSFSTFASGPAGREKTLRPAGAPTNRWREELSHMKRLPPLPGRPYDLAATVATDLESGGAGAACSSNNPALLARRETEEFNDLLDLDFILSNSLTHQESVAATVTTSASASSSSSPASSGPASAPSTCSFSYPIRAGGDPGVAARNTGGGLLYSRESAPPPTAPFNLGDINDVSPSGGFVAELLRPELDPVYIPPQQPQPPGGGLMGKFVLKASLTTPGSEYSSPSVISVSKGSPDGSHPVVVAPYSGGPPRMCPKIKQEAVPSCTVSRSLEAHLSAGPQLSNGHRPNTHDFPLGRQLPTRTTPTLSPEELLNSRDCHPGLPLPPGFHPHPGANYPPFLPDQMQSQVPSLHYQELMPPGSCLPEEPKPKRGRRSWPRKRTATHTCDYAGCGKTYTKSSHLKAHLRTHTGEKPYHCDWDGCGWKFARSDELTRHYRKHTGHRPFQCQKCDRAFSRSDHLALHMKRHF

SEQ ID NO: 1491 - protein, 833 aa, Mus musculus
MWARNLMARALYDNVPECAEELAFRKGDILTVIEQNTGGLEGWWLCSLHGRQGIVPGNRVKLLIGPVQETPGHEQPTPGPMHQTFGQQKLYQVPNSQAASRDTIYQVPPSYQNQGIYQVPTGHGTQNQDVYQVPPSFQRNIGGTNGPLLSKKVITPVRTGLGYVYEYPSRYQKDVYDVPPSHSTQGVYDIPPSSVKGPVFSVPVGEIKPQGVYDIPPTQGVYAIPPSACRDEAGLREKEYDFPPPMKQDGKPDTRPEGVYDIPPTSTKTAGKDLHIKFPCDAPGGVEPMARRHQSFSLHHAPSQLGQSGDTQSDAYDVPRGVQFLEVPTETSEKANPEERDGVYDVPLHNPADAKGSRDVVDGINRLSFSSTGSTRSNMSTSSTSSKESSLSASPSQDKRLRLDPDTAIEKLYRLQQTLEMGVCSLMSLVTTDWRCYGYMERHINEIRTAVDKVELFLREYLHFAKGALANASCLPELVLHNKMSRELQRVEDSHQILSQTSHELDECSWSLNILAINKPQNKCDGLDRFVMVAKTVPDDAKQLTTTISTYAETLFRADPANSHLKNGPNSIMNSSEYTHPGSQMQPLHPGDYKAQVHSKPLPPSLSKDQPPDCGSSDGSERSWMDDYDYVHLQGKEEFERQQKELLEKANIMKQSKAQLEHHQLSQFQLLEQEITKPVENDISKWKPSQSLPTTNNSVGAQDRQLLCFYYDQCETHFISLLNAIDALFSCVTPAQPPRIFVAHSKFVILSAHKLVFIGDTLTRQVAAQDIRNKVRNSSNQLCEQLKTIVMATKMAALHYPSTTALQEMVHQVTDLSRNAQLFKRSLLEMATF

SEQ ID NO: 1492 - protein, 281 aa, Mus musculus
MGSCAQGFMLGCCLLLAITWGPILSLVPRVQEEQQEWEETEELPSPLDPVTRPEETREKYSPRQGEDLPTSRCYRCCDPSTPVYQTIPPPQINITILKGEKGDRGDRGLQGKYGKIGSTGPRGHVGPKGQKGSIGAPGNHCKSQYAAFSVGRKKALHSNDYFQPVVFDTEFVNLYKHFNMFTGKFYCYVPGIYFFSLNVHTWNQKETYLHIMKNEEEVVILYAQVSDRSIMQSQSLMMELREEDEVWVRLFKGERENAIFSDEFDTYITFSGYLVKPASEP

SEQ ID NO: 1493 - protein, 757 aa, Mus musculus
MMWPQPPTFSLFLLLLLSQAPSSRPQSSGTKKLRLVGPADRPEEGRLEVLHQGQWGTVCDDDFALQEATVACRQLGFESALTWAHSAKYGQGEGPIWLDNVRCLGTEKTLDQCGSNGWGISDCRHSEDVGVVCHPRRQHGYHSEKVSNALGPQGRRLEEVRLKPILASAKRHSPVTEGAVEVRYDGHWRQVCDQGWTMNNSRVVCGMLGFPSQTSVNSHYYRKVWNLKMKDPKSRLNSLTKKNSFWIHRVDCFGTEPHLAKCQVQVAPGRGKLRPACPGGMHAVVSCVAGPHFRRQKPKPTRKESHAEELKVRLRSGAQVGEGRVEVLMNRQWGTVCDHRWNLISASVVCRQLGFGSAREALFGAQLGQGLGPIHLSEVRCRGYERTLGDCLALEGSQNGCQHANDAAVRCNIPDMGFQNKVRLAGGRNSEEGVVEVQVEVNGGPRWGTVCSDHWGLTEAMVTCRQLGLGFANFALKDTWYWQGTPEAKEVVMSGVRCSGTEMALQQCQRHGPVHCSHGPGRFSAGVACMNSAPDLVMNAQLVQETAYLEDRPLSMLYCAHEENCLSKSADHMDWPYGYRRLLRFSSQIYNLGRADFRPKAGRHSWIWHQCHRHNHSIEVFTHYDLLTLNGSKVAEGHKASFCLEDTNCPSGVQRRYACANFGEQGVAVGCWDTYRHDIDCQWVDITDVGPGDYIFQVVVNPTNDVAESDFSNNMIRCRCKYDGQRVWLHNCHTGDSYRANAELSLEQEQRLRNNLI

SEQ ID NO: 1494 - protein, 590 aa, Mus musculus
MTAEDSATAMNSDPTVGSSTKVPEGVAGAPNEAALLALIERTGYTMVQENGQRKYGGPPPGWEGPHPQRGCEVFVGKIPRDVYEDELVPVFETVGRIYELRLMMDFDGKNRGYAFVMYCHKHEAKRAVRELNNYEIRPGRLLGVCCSVDNCRLFIGGIPKMKKRGEILEEIAKVTEGVLNVIVYASAADKMKNRGFAFVEYESHRAAAMARRKLMPGRIQLWGHQIAVDWAEPEIDVDEDVMQTVKILYVRNLMIETTEETIKKSFGQFNPGCVERVKKIRDYAFVHFTSREDAVHAMNNLNGTELEGSCLEVTLAKPVDKEQYSRYQKAAKGGGGSAEAVAQQPSYVYSCDPYTLAYYGYPYNALIGPNRDYFVKTGSIRGRGRGAAGNRTPGPRGSYLGGYSAGRGIYSRYHEGKGKQQEKGYELVPNLEISPVNPVAIKPGTVAIPAIGAQYSMFQAAPAPKIIEDGKIHTMEHMISPIAVQPDPATAAAAAAAAAAAAVIPAVSTPPPFQGRPITPVYTVAPNVQRIPTAGIYGASYVPFAAPATATIATLQKNAAAAVYGGYAGYIPQAFPAALQVPIHDVYQTY

SEQ ID NO: 1495 - protein, 332 aa, Mus musculus
MATPVPPPSPRHLRLLRLLLSGLILGAALNGATARRPDATTCPGSLDCALKRRAKCPPGAHACGPCLQSFQEDQRGFCVPRKHLSSGEGLPQPRLEEEIDSLAQELALKEKEAGHSRLTAQPLLERAQKLLEPAATLGFSQWGQRLEPGLPSTHGTSSPIPHTSLSSRASSGPVQMSPLEPQGRHGNGLTLVLILAFCLASSAALAVAALCWCRLQREIRLTQKADYAATAKGPTSPSTPRISPGDQRLAHSAEMYHYQHQRQQMLCLERHKEPPKELESASSDEENEDGDFTVYECPGLAPTGEMEVRNPLFDHSTLSAPVPGPHSLPPLQ

SEQ ID NO: 1496 - protein, 114 aa, Mus musculus; identical to SEQ ID NO: 1414

SEQ ID NO: 1497 - protein, 386 aa, Mus musculus
MLSRKKTKNEVSKPAEVQGKYVKKETSPLLRNLMPSFIRHGPTIPRRTDLCLPDSSATAFSASGDGVVSRNQSFLRTAIQRTPHEVMRRESHRLSAPSYLVRSLADVPRECGSSQSFLTEVNFAVENGDSGSRYFFSDNFFDGQRRRPLGDRAQEDYRYYEYNHDLFQRMPQSQGRHTSGIGRVTATSLGNLTNHGSEDLPLPPGWSVDWTMRGRKYYIDHNTNTTHWSHPLEREGLPPGWERVESSEFGTYYVDHTNKRAQYRHPCAPSVPRYDQPPPITYQPQQTERNQSLLVPANPYHTAEIPDWLQVYARAPVKYDHILKWELFQLADLDTYQGMLKLLFMKELEQIVKLYEAYRQALLTELENRKQRQQWYAQQHGKTFLS

SEQ ID NO: 1498 - protein, 490 aa, Mus musculus
MALNSGSPPGIGPCYENHGYQSEHICPPRPPVAPNGYNLYPAQYYPSPVPQYAPRITTQASTSVIHTHPKSSGAPCTSKSKKSLCLALALGTVLTGAAVAAVLLWRFWDSNCSTSEMECGSLGTCISSSLWCDGVAHCPNGEDENRCVRLYGQSFILQVYSSQRKAWYPVCQDDWSENYGRAACKDMGYKNNFYSSQGIPDQSGATSFMKLNVSSGNVDLYKKLYHSDSCSSRMVVSLRCIECGVRSVKRQSRIVGGLNASPGDWPWQVSLHVQGVHVCGGSIITPEWIVTAAHCVEEPLSGPRYWTAFAGILRQSLMFYGSRHQVEKVISHPNYDSKTKNNDIALMKLQTPLAFNDLVKPVCLPNPGMMLDLDQECWISGWGATYEKGKTSDVLNAAMVPLIEPSKCNSKYIYNNLITPAMICAGFLQGSVDSCQGDSGGPLVTLKNGIWWLIGDTSWGSGCAKALRPGVYGNVTVFTDWIYQQMRANS

SEQ ID NO: 1499 - protein, 462 aa, Mus musculus; identical to SEQ ID NO: 1439

SEQ ID NO: 1500 - protein, 290 aa, Mus musculus
MRIFAGIIFTACCHLLRAFTITAPKDLYVVEYGSNVTMECRFPVERELDLLALVVYWEKEDEQVIQFVAGEEDLKPQHSNFRGRASLPKDQLLKGNAALQITDVKLQDAGVYCCIISYGGADYKRITLKVNAPYRKINQRISVDPATSEHELICQAEGYPEAEVIWTNSDHQPVSGKRSVTTSRTEGMLLNVTSSLRVNATANDVFYCTFWRSQPGQNHTAELIIPELPATHPPQNRTHWVLLGSILLFLIVVSTVLLFLRKQVRMLDVEKCGVEDTSSKNRNDTQFEET

SEQ ID NO: 1501 - protein, 422 aa, Mus musculus; identical to SEQ ID NO: 1488

SEQ ID NO: 1502 - protein, 395 aa, Mus musculus
MQQTTGMHAWQSCSAPQGAATRLCVPLAPGEGCGPRVQAARVHHRLLQQLRRGPLQRCQLSKLLGYGPGDQAGEAQHGFLLRDPCDHPDTRRDLLQLLGSCQEAARPQLAEFQADSQGLLWQRLWELQGDRQVQVDCACVLPAQEPHLHPLLPDLLNSAVFQDRDAARAVLEECTSFIPEARAVLDLVDQCPKEVQKGKFQVIAIEGLDATGKTTLTQSVSESLKAVLLQSPPPCISQWRKIFDDEPTIIRRAFYSLGNYLVASEIAKESTNFPVIVDRYWHSTATYAIATEVSGGLQYLPPAHHPVYQWPGDLLKPDLVLLLTVNSEERVRRLQGRGQEKTKEEAELEANNVFRQKVEMTYQRMENPSCHLVDASPSRETVLQKVLELIQSSGR

SEQ ID NO: 1503 - protein, 1152 aa, Mus musculus
MSQGFRGPTGVFPHQTQSYLDPSHEHSKWRYPQPQGPESYPRSFQLQQIEFLKGRLPEAPLIGIQTQSLPPFLPGHWPRFPGPPAQDRQLEIWEFPRSVTLRNQGFHIGPPLPPPHSRGTPWRGADGLCSHFRELSISQSPEQKVLNRLEELGEGKATTAHVLARELRIPKRDINRILYSLEKKGKLHRGRGKPPLWSLVPLSQAWTQPPGVVNPDSCIQEFPRGEPGLDSEDGDPASDLEGPSEPLDMAEIKEKICDYLFNVSNSSALNLAKNIGLTKARDVTSVLIDLERQGDVYRQGATPPIWYLTDKKRERLQMKRSTHSAPAPTPTAVPEATRSPSFPACHPPPAGASSSVAASKRVENGQEPAIKHESRHEARPGPMRLRPHAYHNGPSRAGYVASENGQWATDDIPDNLNSIHTAPGEFRAIMEMPSFYSPTLPRCSPYKKLTECQLKNPVSGLLEYAQFTSQTCDFNLIEQSGPSHEPRFKFQVVINGREFPPAEAGSKKVAKQDAAVKAMAILLREAKAKDSGQPEDLSHCPMEEDSEKPAEAQAPSSSATSLFSGKSPVTTLLECMHKLGNSCEFRLLSKEGPAHDPKFQYCVAVGAQTFPPVSAPSKKVAKQMAAEEAMKALQEEAASSADDKSGGANTDSLDESMAPNKIRRIGELVRYLNTNPVGGLLEYARSHGFAAEFKLIDQSGPPHEPKFVYQAKVGGRWFPAVCAHSKKQGRQDAADAALRVLIGESEKAEQLGFAELPLSGSTFHDQIAMLSHRCFNALTNSFQPSLLGRKILAAIIMKRDPEDMGVVVSLGTGNRCVKGDSLSLKGETVNDCHAEIISRRGFIRFLYSELMKYNHHTAKNSIFELARGGEKLQIKKTVSFHLYISTAPCGDGAHFDKSCSDRAVESTESRHYPVFENPKQGKLRTKVENGEGTIPVESSDIVPTWDGIRLGERLRTMSCSDKILRWNVLGLQGALLTHFLQPVYLKSVTLGYLFSQGHLTRAICCRVTRDGKAFEDGLRYPFIVNHPKVGRVSVYDSKRQSGKTKETSVNWCMADGYDLEILDGTRGTVDGPGKELSRVSKKNIFLQFKKLCSFRARRDLLQLSYGEAKKAARDYDLAKNYFKKSLRDMGYGNWISKPQEEKNFYLCPVPND

SEQ ID NO: 1504 - protein, 655 aa, Mus musculus; identical to SEQ ID NO: 1449

SEQ ID NO: 1505 - protein, 631 aa, Mus musculus; identical to SEQ ID NO: 1447

SEQ ID NO: 1506 - protein, 386 aa, Mus musculus
MKDCSNGCSAPFAGERGSEEVAETFRAKDLIITPATVLKEKPDPDSLVFGATFTDHMLTVEWSSASGWEKPHIKPFGNLPIHPAASVLHYAVELFEGLKAFRGVDNKIRLFRPDLNMDRMCRSAVRTTLPMFDKEELLKCILQLLQIDQEWVPYSTSASLYIRPTFIGTEPSLGVKKPSKALLFVILSPVGPYFSSGSFTPVSLWANPKYIRAWKGGTGDCKMGGNYGASLLAQCEAVENGCQQVLWLYGKDNQITEVGTMNLFLYWINEDGEEELATPPLDGIILPGVTRQSILELAQQWGEFKVCERHLTMDDLATALEGNRVKEMFGSGTACVVCPVSDILYKGQMLHIPTMENGPKLASRILGKLTDIQYGRVESDWTIELP

SEQ ID NO: 1507 - protein, 158 aa, Mus musculus
MLVMKLFTCFLQVLAGLAVHSQGALSAGNNSTEVEVVPFNEVWGRSYCRPMEKLVYILDEYPDEVSHIFSPSCVLLSRCSGCCGDEGLHCVPIKTANITMQILKIPPNRDPHFYVEMTFSQDVLCECRPILETTKAERRKTKGKRKRSRNSQTEEPHP

SEQ ID NO: 1508 - protein, 171 aa, Mus musculus
MEFPDLGKHCSEPTCKQLDFLPITCDACKQDFCKDHFSYVGHKCPFAFKKDVQVPVCPLCNAPIPVKRGEIPDVVVGEHMDRDCTFHPGRNRNKVFTHRCSKEGCRKKEMLQLACAQCHGNFCIQHRHPLDHNCQAGSSSASRGRTSTSRAAEQKPSGVSWLAQRLRRTVK

SEQ ID NO: 1509 - protein, 160 aa, Mus musculus
MKQKKKKTPNRVSGTNGSEKPSEKPAPDEAPPSAEAQAEQLARELAWCVEQLELGLKTQRPTPKQKEQAVGAIRTLRSEKTPLPRKRQLMRSLFGDYRAQMDAEWREALRALKAATHSAQVQLVSEATRKKSGRVCRPRPAERAKTTPDLTSEEFRFNFF

SEQ ID NO: 1510 - protein, 362 aa, Mus musculus; identical to SEQ ID NO: 1405

SEQ ID NO: 1511 - protein, 211 aa, Mus musculus; identical to SEQ ID NO: 1473

SEQ ID NO: 1512 - protein, 830 aa, Mus musculus; identical to SEQ ID NO: 1475

SEQ ID NO: 1513 - protein, 300 aa, Mus musculus
MILEGSGVMNLNPANNLLHQQPAWTDSYPTCNVSSGFFGSQWHEIHPQYWTKYQVWEWLQHLLDTNQLDASCIPFQEFDISGEHLCSMSLQEFTRAAGSAGQLLYSNLQHLKWNGQCSSDLFQSAHNVIVKTEQTDPSIMNTWKEENYLYDPSYGSTVDLLDSKTFCRAQISMTTSSHLPVAESPDMKKEQDHPVKSHTKKHNPRGTHLWEFIRDILLSPDKNPGLIKWEDRSEGIFRFLKSEAVAQLWGKKKNNSSMTYEKLSRAMRYYYKREILERVDGRRLVYKFGKNARGWRENEN

SEQ ID NO: 1514 - protein, 2764 aa, Mus musculus
MDVKDRRHRSLTRGRCGKECRYTSSSLDSEDCRVPTQKSYSSSETLKAYDHDSRMHYGNRVTDLVHRESDEFSRQGTNFTLAELGICEPSPHRSGYCSDMGILHQGYSLSTGSDADSDTEGGMSPEHAIRLWGRGIKSRRSSGLSSRENSALTLTDSDNENKSDDDNGRPIPPTSSSSLLPSAQLPSSHNPPPVSCQMPLLDSNTSHQIMDTNPDEEFSPNSYLLRACSGPQQASSSGPPNHHSQSTLRPPLPPPHNHTLSHHHSSANSLNRNSLTNRRSQIHAPAPAPNDLATTPESVQLQDSWVLNSNVPLETRHFLFKTSSGSTPLFSSSSPGYPLTSGTVYTPPPRLLPRNTFSRKAFKLKKPSKYCSWKCAALSAIAAALLLAILLAYFIAMHLLGLNWQLQPADGHTFNNGVRTGLPGNDDVATVPSGGKVPWSLKNSSIDSGEAEVGRRVTQEVPPGVFWRSQIHISQPQFLKFNISLGKDALFGVYIRRGLPPSHAQYDFMERLDGKEKWSVVESPRERRSIQTLVQNEAVFVQYLDVGLWHLAFYNDGKDKEMVSFNTVVLDSVQDCPRNCHGNGECVSGLCHCFPGFLGADCAKAACPVLCSGNGQYSKGTCQCYSGWKGAECDVPMNQCIDPSCGGHGSCIDGNCVCAAGYKGEHCEEVDCLDPTCSSHGVCVNGECLCSPGWGGLNCELARVQCPDQCSGHGTYLPDSGLCSCDPNWMGPDCSVVCSVDCGTHGVCIGGACRCEEGWTGAACDQRVCHPRCIEHGTCKDGKCECREGWNGEHCTIDGCPDLCNGNGRCTLGQNSWQCVCQTGWRGPGCNVAMETSCADNKDNEGDGLVDCLDPDCCLQSACQNSLLCRGSRDPLDIIQQGQTDWPAVKSFYDRIKLLAGKDSTHIIPGDNPFNSSLVSLIRGQVVTMDGTPLVGVNVSFVKYPKYGYTITRQDGTFDLIANGGSALTLHFERAPFMSQERTVWLPWNSFYAMDTLVMKTEENSIPSCDLSGFVRPDPIIISSPLSTFFSASPASNPIVPETQVLHEEIELPGTNVKLRYLSSRTAGYKSLLKITMTQSTVPLNLIRVHLMVAVEGHLFQKSFQASPNLAYTFIWDKTDAYGQRVYGLSDAVVSVGFEYETCPSLILWEKRTALLQGFELDPSNLGGWSLDKHHTLNVKSGILHKGTGENQFLTQQPAIITSIMGNGRRRSISCPSCNGLAEGNKLLAPVALAVGIDGSLFVGDFNYIRRIFPSRNVTSILELRNKEFKHSNSPGHKYYLAVDPVTGSLYVSDTNSRRIYRVKSLSGAKDLAGNSEVVAGTGEQCLPFDEARCGDGGKAVDATLMSPRGIAVDKNGLMYFVDATMIRKVDQNGIISTLLGSNDLTAVRPLSCDSSMDVAQVRLEWPTDLAVNPMDNSLYVLENNVILRITENHQVSIIAGRPMHCQVPGIDYSLSKLAIHSALESASAIAISHTGVLYITETDEKKINRLRQVTTNGEICLLAGAASDCDCKNDVNCICYSGDDAYATDAILNSPSSLAVAPDGTIYIADLGNIRIRAVSKNKPVLNAFNQYEAASPGEQELYVFNADGIHQYTVSLVTGEYLYNFTYSADNDVTELIDNNGNSLKIRRDSSGMPRHLLMPDNQIITLTVGTNGGLKAVSTQNLELGLMTYDGNTGLLATKSDETGWTTFYDYDHEGRLTNVTRPTGVVTSLHREMEKSITIDIENSNRDDDVTVITNLSSVEASYTVVQDQVRNSYQLCNNGTLRVMYANGMAVSFHSEPHVLAGTITPTIGRCNISLPMENGLNSIEWRLRKEQIKGKVTIFGRKLRVHGRNLLSIDYDRNIRTEKIYDDHRKFTLRIIYDQVGRPFLWLPSSGLAAVNVSYFFNGRLAGLQRGAMSERTDIDKQGRIVSRMFADGKVWSYSYLDKSMVLLLQSQRQYIFEYDSSDRLHAVTMPSVARHSMSTHTSIGYIRNIYNPPESNASVIFDYSDDGRILKTSFLGTGRQVFYKYGKLSKLSEIVYDSTAVTFGYDETTGVLKMVNLQSGGFSCTIRYRKVGPLVDKQIYRFSEEGMINARFDYTYHDNSFRIASIKPVISETPLPVDLYRYDEISGKVEHFGKFGVIYYDINQIITTAVMTLSKHFDTHGRIKEVQYEMFRSLMYWMTVQYDSMGRVIKRELKLGPYANTTKYTYDYDGDGQLQSVAVNDRPTWRYSYDLNGNLHLLNPGNSARLMPLRYDLRDRITRLGDVQYKIDDDGYLCQRGSDIFEYNSKGLLTRAYNKASGWSVQYRYDGVGRRASYKTNLGHHLQYFYSDLHNPTRITHVYNHSNSEITSLYYDLQGHLFAMESSSGEEYYVASDNTGTPLAVYSINGLMIKQLQYTAYGEIYYDSNPDFQMVIGFHGGLYDPLTKLVHFTQRDYDVLAGRWTSPDYTMWRNVGKEPAPFNLYMFKNNNPLSNELDLKNYVTDVKSWLVMFGFQLSNIIPGFPRAKMYFVPPPYELSESQASENGQLITGVQQTTERHNQAFLALEGQVITKKLHASIREKAGHWFATTTPIIGKGIMFAIKEGRVTTGVSSIASEDSRKVASVLNNAYYLDKMHYSIEGKDTHYFVKIGAADGDLVTLGTTIGRKVLESGVNVTVSQPTLLVNGRTRRFTNIEFQYSTLLLSIRYGLTPDTLDEEKARVLDQAGQRALGTAWAKEQQKARDGREGSRLWTEGEKQQLLSTGRVQGYEGYYVLPVEQYPELADSSSNIQFLRQNEMGKR

SEQ ID NO: 1515 - protein, 514 aa, Mus musculus
MSISSDEVNFLVYRYLQESGFSHSAFTFGIESHISQSNINGALVPPAALISIIQKGLQYVEAEVSINEDGTLFDGRPIESLSLIDAVMPDVVQTRQQAYRDKLAQQHAAAAAAAAAATNQQGSAKNGENTANGEENGAHTIANNHTDMMEVDGDVEIPSNKAVVLRGHESEVFICAWNPVSDLLVSGSGDSTARIWNLSENSTSGPTQLVLRHCIREGGQDVPSNKDVTSLDWNSEGTLLATGSYDGFARIWTKDGNLASTLGQHKGPIFALKWNKKGNFILSAGVDKTTIIWDAHTGEAKQQFPFHSAPALDVDWQSNNTFASCSTDMCIHVCKLGQDRPIKTFQGHTNEVNAIKWDPTGNLLASCSDDMTLKIWSMKQDNCVHDLQAHNKEIYTIKWSPTGPGTNNPNANLMLASASFDSTVRLWDVDRGICIHTLTKHQEPVYSVAFSPDGRYLASGSFDKCVHIWNTQTGALVHSYRGTGGIFEVCWNAAGDKVGASASDGSVCVLDLRK

SEQ ID NO: 1516 - protein, 135 aa, Mus musculus
MACGLVASNLNLKPGECLKVRGEVASDAKSFVLNLGKDSNNLCLHFNPRFNAHGDANTIVCNTKEDGTWGTEHREPAFPFQPGSITEVCITFDQADLTIKLPDGHEFKFPNRLNMEAINYMAADGDFKIKCVAFE

SEQ ID NO: 1517 - protein, 1209 aa, Mus musculus
MMELPLCGRGLILSLIFLLLKLSAAEIPLSVQQVPTIVKQSYVQVAFPFDEYFQIECEAKGNPEPIFSWTKDDKPFDLSDPRIIAANNSGTFKIPNEGHISHFQGKYRCFASNRLGTAVSEEIEFIVPGVPKFPKEKIEPIDVEEGDSIVLPCNPPKGLPPLHIYWMNIELEHIEQDERVYMSQRGDLYFANVEENDSRNDYCCFAAFPKLRTIVQKMPMKLTVNSSNSIKQRKPKLLLPPAQMGSLSAKTVLKGDTLLLECFAEGLPTPHIQWSKPGSELPEGRATIEVHEKTLKIENISYQDRGNYRCTANNLLGKASHDFHVTVEEPPRWKKKPQSAVYSTGSSGILLCEAEGEPQPTIKWRLNGLPIEKHPFPGDFMFPREISFTNLLPNHTGVYQCEASNIHGTILANANIDVIDVIPLIKTKNEENYATVVGYSAFLHCEYFASPKATVVWEVADETHPLEGDRYHTHENGTLEIYRTTEEDAGSYSCWVDNAMGKAVITANLDIRNATKLRVSPKNPRIPKSHVLELYCESQCDSHLKHSLKLSWSKDGEAFEMNGTEDGRIVIDGAYLTISNITAEDQGVYSCSAQTSLDSTSKKTQVTVLGVGDPPETFTCQKDKNRSVRLLREAGDDHNSKSASTIVEFEGNREEPGKWEELTRVQGEETDVVLSLAPYVRYQFRVTAVNEVGRSHASLPSDHHETPPAAPDKNPQNIRVQASQPKEMIIKWEPLKSMEQNGPGLEYKVSWKPQGAPEEWEEEIVTNHTLRVMTPTVYAPYDVKVQAINQLGSSPDPQPVTLYSGEDYPSTAPVIQRVDVMNSTLVKVTWSSIPKETVHGLLRGYQINWWKTKSLLDGRTHPKEVNILRFSGQRNSGMVPSLDPFSEFHLTVLAYNSKGAGPESEPYIFQTPEGVPEQPSFLKVIKVDKDTATLSWGLPKKLNGNLTGYLLQYQIINDTYELGELNEINVTTPSKSSWHLSNLNSTTKYKFYLRACTSRGCGKPISEEGATLGEGSKGIRKITEGVNVTQKIHPVEVLVPGAEHIVHLMTKNWGDNDSIFQDVIETRGREYAGLYDDISTQGWFIGLMCAIALLTLILLTICFVKRNRGGKYSVKEKEDLHPDPEVQSAKDETFGEYSDSDEKPLKGSLRSLNRNMQPTESADSLVEYGEGDQSIFNEDGSFIGAYTGAKEKGSVESNGSSTATFPLRA

SEQ ID NO: 1518 - protein, 2397 aa, Mus musculus
MLINMKGILWMCSTLLLTHALHQAKMETSPPVKGSLSGKVVLPCHFSTLPTLPPNYNTSEFLRIKWSKMEVDKNGKDIKETTVLVAQNGNIKIGQDYKGRVSVPTHPDDVGDASLTMVKLRASDAAVYRCDVMYGIEDTQDTMSLAVDGVVFHYRAATSRYTLNFAAAQQACLDIGAVIASPEQLFAAYEDGFEQCDAGWLSDQTVRYPIRAPREGCYGDMMGKEGVRTYGFRSPQETYDVYCYVDHLDGDVFHITAPSKFTFEEAEAECTSRDARLATVGELQAAWRNGFDQCDYGWLSDASVRHPVTVARAQCGGGLLGVRTLYRFENQTCFPLPDSRFDAYCFKRRLSDMIVSGHPIDSESKEEEPCSEETDPLHDLFAEILPELPDSFEIDIYHSEEDEDGEEDCVNATDVTTTPSVQYINGKQLVTTVPKDPEAAEARRGQYESVAPSQNFPDSSATDTHQFILAETESSTTMQFKKSKEGTELLEITWKPETYPETPDHVSSGEPDVFPTLSSHDGKTTRWSESITESSPNLENPVHKQPKPVPLFPEESSGEGAIEQASQETILSRATEVALGKETDQSPTLSTSSILSSSVSVNVLEEEPLTLTGISQTDESMSTIESWVEITPSQTVKFSESSSAPIIEGSGEVEENKNKIFNMVTDLPQRDPTDTLSPLDMSKIMITNHHIYIPATIAPLDSKLPSPDARPTTVWNSNSTSEWVSDKSFEGRKKKENEDEEGAVNAAHQGEVRAATERSDHLLLTPELESSNVDASSDLATWEGFILETTPTESEKEMANSTPVFRETIGVANVEAQPFEHSSSSHPRVQEELTTLSGNPPSLFTDLGSGDASTGMELITASLFTLDLESETKVKKELPSTPSPSVEISSSFEPTGLTPSTVLDIEIAGVMSQTSQKTLISEISGKPTSQSGVRDLYTGFPMGEDFSGDFSEYPTVSYPTMKEETVGMGGSDDERVRDTQTSSSIPTTSDNIYPVPDSKGPDSTVASTTAFPWEEVMSSAEGSGEQLASVRSSVGPVLPLAVDIFSGTESPYFDEEFEEVAAVTEANERPTVLPTAASGNTVDLTENGYIEVNSTMSLDFPQTMEPSKLWSKPEVNLDKQEIGRETVTKEKAQGQKTFESLHSSFAPEQTILETQSLIETEFQTSDYSMLTTLKTYITNKEVEEEGMSIAHMSTPGPGIKDLESYTTHPEAPGKSHSFSATALVTESGAARSVLMDSSTQEEESIKLFQKGVKLTNKESNADLSFSGLGSGGALPPLPTTSVNLTDMKQIISTLYAETSHMESLGTSILGDKMEDHERMEDVSSNEVRMLISKIGSISQDSTEALDTTLSHTGTEEPTTSTLPFVKLMDLERSPKQDPSGGKRKPKTHRPQTMSGLISNENSSASEAEEGATSPTAFLPQTYSVEMTKHFAPSESQPSDLFNVNSGEGSGEVDTLDLVYTSGTTQASSQGDSMLASHGFLEKHPEVSKTEAGATDVSPTASAMFLHHSEYKSSLYPTSTLPSTEPYKSPSEGIEDGLQDNIQFEGSTLKPSRRKTTESIIIDLDKEDSKDLGLTITESAIVKSLPELTSDKNIIIDIDHTKPVYEYIPGIQTDLDPEIKLESHGSSEESLQVQEKYEGAVTLSPTEESFEGSGDALLAGYTQAIYNESVTPNDGKQAEDISFSFATGIPVSSTETELHTFFPTASTLHIPSKLTTASPEIDKPNIEAISLDDIFESSTLSDGQAIADQSEVISTLGHLEKTQEEYEEKKYGGPSFQPEFFSGVGEVLTDPPAYVSIGSTYLIAQTLTELPNVVRPSDSTHYTEATPEVSSLAELSPQIPSSPFPVYVDNGVSKFPEVPHTSAQPVSTVTSSQKSIESPFKEVHANIEETIKPLGGNVHRTEPPSMSRDPALDVSEDESKHKLLEELETSPTKPETSQDFPNKAKDHIPGETVGMLAGIRTTESEPVITADDMELGGATQQPHSASAAFRVETGMVPQPIQQEPERPTFPSLEINHETHTSLFGESILATSEKQVSQKILDNSNQATVSSTLDLHTAHALSPFSILDNSNETAFLIGISEESVEGTAVYLPGPDLCKTNPCLNGGTCYPTETSYVCTCAPGYSGDQCELDFDECHSNPCRNGATCVDGFNTFRCLCLPSYVGALCEQDTETCDYGWHKFQGQCYKYFAHRRTWDAAERECRLQGAHLTSILSHEEQMFVNRVGHDYQWIGLNDKMFEHDFRWTDGSALQYENWRPNQPDSFFSAGEDCVVIIWHENGQWNDVPCNYHLTYTCKKGTVACGQPPVVENAKTFGKMKPRYEINSLIRYHCKDGFIQRHLPTIRCLGNGRWAMPKITCMNPSAYQRTYSKKYLKNSSSAKDNSINTSKHEHRWSRRQETRR

SEQ ID NO: 1519 - protein, 311 aa, Mus musculus
MRRAALWLWLCALALRLQPALPQIVAVNVPPEDQDGSGDDSDNFSGSGTGALPDTLSRQTPSTWKDVWLLTATPTAPEPTSSNTETAFTSVLPAGEKPEEGEPVLHVEAEPGFTARDKEKEVTTRPRETVQLPITQRASTVRVTTAQAAVTSHPHGGMQPGLHETSAPTAPGQPDHQPPRVEGGGTSVIKEVVEDGTANQLPAGEGSGEQDFTFETSGENTAVAAVEPGLRNQPPVDEGATGASQSLLDRKEVLGGVIAGGLVGLIFAVCLVAFMLYRMKKKDEGSYSLEEPKQANGGAYQKPTKQEEFYA

SEQ ID NO: 1520 - protein, 395 aa, Mus musculus
MAPSPLAWLLRLAAFFHLCTLLPGQHLGMTKCEIMCGKMTSRIPVALLIRYQLNQESCGKRAIVLETTQHRRFCADPKEKWVQDAMKHLDHQAAALTKNGGKFEKRVDNVTPGITLATRGLSPSALTKPESATLEDLALELTTISQEARGTMGTSQEPPAAVTGSSLSTSEAQDAGLTAKPQSIGSFEAADISTTVWPSPAVYQSGSSSWAEEKATESPSTTAPSPQVSTTSPSTPEENVGSEGQPPWVQGQDLSPEKSLGSEEINPVHTDNFQERGPGNTVHPSVAPISSEETPSPELVASGSQAPKIEEPIHATADPQKLSVLITPVPDTQAATRRQAVGLLAFLGLLFCLGVAMFAYQSLQGCPRKMAGEMVEGLRYVPRSCGSNSYVLVPV

SEQ ID NO: 1521 - protein, 683 aa, Mus musculus
MALLMRLLTLALALSVGPAGTLAGPAKSPYQLVLQHSRLRGRQHGPNVCAVQKVIGTNKKYFTNCKQWYQRKICGKSTVISYECCPGYEKVPGEKGCPAALPLSNLYETMGVVGSTTTQLYTDRTEKLRPEMEGPGSFTIFAPSNEAWSSLPAEVLDSLVSNVNIELLNALRYHMVDRRVLTDELKHGMTLTSMYQNSNIQIHHYPNGIVTVNCARLLKADHHATNGVVHLIDKVISTITNNIQQIIEIEDTFETLRAAVAASGLNTVLEGDGQFTLLAPTNEAFEKIPAETLNRILGDPEALRDLLNNHILKSAMCAEAIVAGMSMETLGGTTLEVGCSGDKLTINGKAVISNKDILATNGVIHFIDELLIPDSAKTLLELAGESDVSTAIDILKQAGLDTHLSGKEQLTFLAPLNSVFKDGVPRIDAQMKTLLLNHMVKEQLASKYLYSGQTLDTLGGKKLRVFVYRNSLCIENSCIAAHDKRGRFGTLFTMDRMLTPPMGTVMDVLKGDNRFSMLVAAIQSAGLMEILNREGVYTVFAPTNEAFQAMPPEELNKLLANAKELTNILKYHIGDEILVSGGIGALVRLKSLQGDKLEVSSKNNVVSVNKEPVAETDIMATNGVVYAINTVLQPPANRPQERGDELADSALEIFKQASAYSRAAQRSVRLAPVYQRLLERMKH

SEQ ID NO: 1522 - protein, 822 aa, Mus musculus
MPAPIRLRELIRTIRTARTQAEEREMIQKECAAIRSSFREEDNTYRCRNVAKLLYMHMLGYPAHFGQLECLKLIASQKFTDKRIGYLGAMLLLDERQDVHLLMTNCIKNDLNHSTQFVQGLALCTLGCMGSSEMCRDLAGEVEKLLKTSNSYLRKKAALCAVHVIRKVPELMEMFLPATKNLLNEKNHGVLHTSVVLLTEMCERSPDMLAHFRKLVPQLVRILKNLIMSGYSPEHDVSGISDPFLQVRILRLLRILGRNDDDSSEAMNDILAQVATNTETSKNVGNAILYETVLTIMDIKSESGLRVLAINILGRFLLNNDKNIRYVALTSLLKTVQTDHNAVQRHRSTIVDCLKDLDVSIKRRAMELSFALVNGNNIRGMMKELLYFLDSCEPEFKADCASGIFLAAEKYAPSKRWHIDTIMRVLTTAGSYVRDDAVPNLIQLITNSVEMHAYTVQRLYKAILGDYSQQPLVQVAAWCIGEYGDLLVSGQCEEEEPIQVTEDEVLDILESVLISNMSTSVTRGYALTAIMKLSTRFTCTVNRIKKVVSIYGSSIDVELQQRAVEYNALFKKYDHMRSALLERMPVMEKVTTNGPSEIVQTNGETEPAPLETKPPPSGPQPTSQANDLLDLLGGNDITPVIPTAPTSKPASAGGELLDLLGDITLTGAPAAAPTPASVPQISQPPFLLDGLSSQPLFNDIAPGIPSITAYSKNGLKIEFTFERSNTNPSVTVITIQASNSTELDMTDFVFQAAVPKTFQLQLLSPSSSVVPAFNTGTITQVIKVLNPQKQQLRMRIKLTYNHKGSAMQDLAEVNNFPPQSWQ

SEQ ID NO: 1523 - protein, 375 aa, Mus musculus
MSTAGKVIKCKAAVLWELHKPFTIEDIEVAPPKAHEVRIKMVATGVCRSDDHVVSGTLVTPLPAVLGHEGAGIVESVGEGVTCVKPGDKVIPLFSPQCGECRICKHPESNFCSRSDLLMPRGTLREGTSRFSCKGKQIHNFISTSTFSQYTVVDDIAVAKIDGASPLDKVCLIGCGFSTGYGSAVKVAKVTPGSTCAVFGLGGVGLSVIIGCKAAGAARIIAVDINKDKFAKAKELGATECINPQDYSKPIQEVLQEMTDGGVDFSFEVIGRLDTMTSALLSCHAACGVSVVVGVPPNAQNLSMNPMLLLLGRTWKGAIFGGFKSKDSVPKLVADFMAKKFPLDPLITHVLPFEKINEAFDLLRSGKSIRTVLTF

SEQ ID NO: 1524 - protein, 535 aa, Mus musculus
MAKKVVVIGAGVSGLISLKCCVDEGLEPTCFERTEDIGGLWRFKENVEDGRASIYRSVITNTSKEMSCFSDFPMPEDFPNFLHNSKLLEYFRIFAKKFDLLKYIQFQTTVISVKKRPDFASSGQWEVYTQSNGKEQRTVFDAVMVCSGHHIQPHLPLKSFPGIERFRGRYFHSREYKHPVGFEGKRILVVGIGNSAADIASELSKTAAQVFVSTRHGSWVMSRISEDGYPWDMVFHTRFSSMLRNVLPRTVVKWMMEQQMNRWFNHENYGLVPQNKYLMKEPVLNDDLPSRLLYGAIKVKTRVKELTETAVVFEDGTVEEDVDIIVFATGYTFSFSFLEDSLVKVEDNRVSLYKAMFPPHLEKPTLACIGLIQPLGSIFPTVELQARWATRVFKGLCSLPSETTMMADIVERNEKRVNLFGKSQSQILQTNYVDYLDELALEIGAKPDFVSLFFKDPKLAVKLYFGPCNSYQYRLVGPGQWEGARNAILTQKQRILKPLKTRTLQSSDSAPVSFLLKILGLLAVVLAFFFQLQGF

SEQ ID NO: 1525 - protein, 815 aa, Mus musculus
MEGPRSDVGRWGRSPWQPPTTPSPEPEPVPEPDRRSRSRRGGGRSFWARCCGCCSCGNRGDDDWGPEPSGSRSRGTSSRGRDSRGGRRPESRGSGVNAAGDGTIREGMLVVTGVDLLCSRSDQNRREHHTDEFEYDELIVRRGQPFHMILFLNREYESSDRIALELLIGSNPEVGKGTHVIIPVGKGGSGGWKAQVTKNNGHNLNLRVHTSPNAIIGKFQFTVRTRSEAGEFQLPFDPRNEIYILFNPWCPEDIVYVDHEDWRQEYVLNESGRIYYGTEAQIGERTWNYGQFDHGVLDACLYILDRRGMPYGGRGDPVSVSRVVSAMVNSLDDNGVLIGNWTGDYSRGTNPSAWVGSVEILLSYLRTGYSVPYGQCWVFAGVTTTVLRCLGFATRTVTNFNSAHDTDTSLTMDIYFDENMKPLEHLNHDSVWNFHVWNDCWMKRPDLPSGFDGWQVVDATPQETSSGIFCCGPCSVESVKNGLVYMKYDTPFIFAEVNSDKVYWQRQDDGSFKIVYVEEKAIGTLIVTKAIHSNNREDITHIYKHPEGSEAERRAVEKAAAHGSKPNVYATRDSAEDVAMQVEAQDAVMGQDLAVSVVLTNRGSSRRTVKLHLYLCVTYYTGVSGPTFKEAKKEVTLAPGASDSVTMPVAYKEYKPHLVDQGAMLLNVSGHVKESGQVLAKQHTFRLRTPDLSLTLLGAAVVGQECGVQIVFKNPLPVTLTNVVFRLEGSGLQRPKVLNVGDIGGNETVTLRQTFVPVRPGPRQLIASLDSPQLSQVHGVIQVDVAPASGGSGFSDAGGDSRSGENIPMAYRGGA

SEQ ID NO: 1526 - protein, 850 aa, Mus musculus
MAKPLTDQEKRRQISIRGIVGVENVAELKKGFNRHLHFTLVKDRNVATPRDYYFALAHTVRDHLVGRWIRTQQHYYDKCPKRVYYLSLEFYMGRTLQNTMINLGLQNACDEAIYQLGLDMEELEEIEEDAGLGNGGLGRLAACFLDSMATLGLAAYGYGIRYEYGIFNQKIREGWQVEEADDWLRHGNPWEKARPEFMLPVHFYGRVEHTQTGTKWVDTQVVLALPYDTPVPGYMNNTVNTMRLWSARAPNDFNLQDFNVGDYIQAVLDRNLAENISRVLYPNDNFFEGKELRLKQEYFVVAATLQDVIRRFKASKFGSKDGVGTVFDAFPDQVAIQLNDTHPALAIPELMRIFVDIEKLPWAKAWEITKKTFAYTNHTVLPEALERWPVELVEKLLPRHLEIIYEINQKHLDRIVALFPKDISRMRRMSLIEEEGGKRINMAHLCIVGCHAVNGVAKIHSDIVKTQVFKDFSELEPDKFQNKTNGITPRRWLLLCNPGLADLIAEKIGEDYVKDLSQLTKLHSFVSDDIFLREIAKVKQENKLKFSQFLEKEYKVKINPSSMFDVHVKRIHEYKRQLLNCLHVITMYNRIKKDPKKFFVPRTVIIGGKAAPGYHMAKMIIKLITSVAEVVNNDPMVGSKLKVIFLENYRVSLAEKVIPATDLSEQISTAGTEASGTGNMKFMLNGALTIGTMDGANVEMAEEAGEENLFIFGMRVDDVAALDKKGYEAKEYYEALPELKLVIDQIDNGFFSPNQPDLFKDIINMLFYHDRFKVFADYEAYVKCQEKVSQLYMNQKAWNTMVLKNIAASGKFSSDRTIKEYAKDIWNMEPSDLKISLSNESSNGVSANGK

SEQ ID NO: 1527 - protein, 313 aa, Mus musculus
MKRAPAFLSAEEVQDHLRSSSLLIPPLEAALANFSKGPDGGVMQPVRTVVPVAKHRGFLGVMPAYSAAEDALTTKLVTFYEGHSNTAVPSHQASVLLFDPSNGSLLAVMDGNVITAKRTAAVSAIATKLLKPPGSDVLCILGAGVQAYSHYEIFTEQFSFKEVRMWNRTRENAEKFASTVQGDVRVCSSVQEAVTGADVIITVTMATEPILFGEWVKPGAHINAVGASRPDWRELDDELMRQAVLYVDSREAALKESGDVLLSGADIFAELGEVISGAKPAHCEKTTVFKSLGMAVEDLVAAKLVYDSWSSGK

SEQ ID NO: 1528 - protein, 455 aa, Mus musculus
MWLELILASVLGFVIYWFVSRDKEETLPLEDGWWGPGSKPSAKEDESIRPFKVETSDEEIKDLHQRIDRFRASPPLEGSRFHYGFNSSYLKKVVSFWRNEFDWRKQVEILNQYPHFKTKIEGLDIHFIHVKPPQLPSGRTPKPLLMVHGWPGSFYEFYKIIPLLTDPKTHGLSDEHVFEVICPSIPGYGFSEASSKKGLNSVATARIFYKLMSRLGFQKFYIQGGDWGSLICTNIAQMVPNHVKGLHLNMSFISRNIYSLTPLLGQRFGRFLGYTEKDLELLYPFKEKVFYNIMRESGYLHIQATKPDTVGCALNDSPVGLAAYILEKFSTWTKSEYRELEDGGLERKFSLEDLLTNIMIYWTTGTIVSSQRFYKENLGQGVMVHRHEGMKVFVPTGYSAFPSEILHAPEKWVKVKYPKLISYSYMERGGHFAAFEEPKLLAQDIRKFVSLAELQ

SEQ ID NO: 1529 - protein, 1062 aa, Mus musculus
  MISC_FEATURE (508)..(508): "Xaa" = any amino acid
MKFLLLSTFIFLYSSLALARDKHYFIGITEAVWDYASGTEEKKLISVDTEQSNFYLQNGPDRIGRKYKKALYFEYTDGTFSKTIDKPAWLGFLGPVIKAEVEDKVYVHLKNLASRIYTFHAHGVTYTKEYEGAVYPDNTTDFQRADDKVLPGQQYVYVLHANEPSPGEGDSNCVTRIYHSHVDAPKDIASGLIGPLILCKKGSLYKEKEKNIDQEFVLMFSVVDENLSWYLEDNIKTFCSEPEKVDKDNEDFQESNRMYSINGYTFGSLPGLSMCAADRVKWYLFGMGNEVDVHSAFFHGQALTSRNYQTDIINLFPATLIDAYMVAQNPGVWMLSCQNLNHLKAGLQAFFQVQDCNKPSSKDNIRGKHVRHYYIAAEEVIWNYAPSGIDIFTEEKLTASGSDSGVFFEQGATRIGGSYKKMAYREYTDGSFTNRKERGPDEEHLGILGPVIWAEVGDTIKVTFHNKGQHHLSIQPMGVSFTAENEGTYYGPPGASSQQAASHVAPKXTFTYEWTVPKEMGPTYADPVCLSKMYYSAVDPTKDIFTGLIGPMKICKKGSLLADGRQKDVDKEFYLFPTVFDENESLLLDDNIRMFTHAPDQVDKEDEDFQESNKMHSMNGFMYGNQSWPHMCLGESIVWYLFSAGNEADVHGIYFSGNTYLCKGEERDTANLFPHKSLTLLMNPDTKGTFDVECLTTDHYTGGMKQKYTVNQCQRQFEDFTVYLGERTYYVDAVEVEWDYSPSRAWEKELHHLQEQNVSNVFLDKEEFFIGSKYKKVVYRQFTDSSFREQVKRRAEEDEHLGILGPPIHANVGDKVKVVFKNMATRPYSIHAHGVKTESSTVVPTLPGEVATYTWQIPERSGAGREDSACIPWAYYSTVDRVKDLYSGLIGPLIVCRKSYVKVFSPKKKMEFFLLFLVFDENESWYLDDNIKTYSEHPEKVNKDNEEFLESNKMHAINGKMFGNLQGLTMHVKDEVNWYLMGMGNEIDLHTVHFHGHSFQYKHRGVYSSDVFDLFPGTYQTLEMFPQTPGTWLLHCHVTDHVHAGMATTYTVLPVEQETKSG

SEQ ID NO: 1530 - protein, 577 aa, Mus musculus
MMDRKQTAETLLTLSPAEVANLKEGINFFRNKTTGKEYILYKEKDHLKACKNLCKHQGGLFMKDIEDLDGRSVKCTKHNWKLDVSTMKYINPPGSFCQDELVIEMDENNGLSLVELNPPNPWDSDPRSPEELAFGEVQITYLTHACMDLKLGDKRMVFDPWLIGPAFARGWWLLHEPPSDWLERLCKADLIYISHMHSDHLSYPTLKQLSQRRPDIPIYVGDTERPVFWNLDQSGVGLTNINVVPFGIWQQVDKSLRFMILMDGVHPEMDTCIIVEYKGHKILNTVDCTRPNGGRLPEKVALMMSDFAGGASGFPMTFSGGKFTEEWKAQFIKAERRKLLNYKAQLVKDLQPRIYCPFAGYFVESHPSDKYIKETNTKNDPNQLNNLIRKNSDVVTWTPRPGAVLDLGRMLKDPTDSKGIVEPPEGTKIYKDSWDFGPYLEILNSAVRDEIFCHSSWIKEYFTWAGFKNYNLVVRMIETDEDFSPFPGGYDYLVDFLDLSFPKERPSREHPYEEIHSRVDVIRYVVKNGLLWDDLYIGFQTRLLRDPDIYHHLFWNHFQIKLPLTPPNWKSFLMHCD

SEQ ID NO: 1531 - protein, 699 aa, Mus musculus
MEVHELFRYFRMPELIDIRQYVRTLPTNTLMGFGAFAALTTFWYATRPKALKPPCDLSMQSVEIAGTTDGIRRSAVLEDDKLLVYYYDDVRTMYDGFQRGIQVSNNGPCLGSRKPNQPYEWISYKEVAELAECIGSGLIQKGFKPCSEQFIGLFSQNRPEWVIVEQGCFSYSMVVVPLYDTLGADAITYIVNKAELSVIFADKPEKAKLLLEGVENKLTPCLKIIVIMDSYGSDLVERGKKCGVEIISLKALEDLGRVNRVKPKPPEPEDLAIICFTSGTTGNPKGAMITHQNIINDCSGFIKATESAFIASTDDVLISFLPLAHMFETVVECVMLCHGAKIGFFQGDIRLLMDDLKVLQPTIFPVVPRLLNRMFDRIFGQANTSLKRWLLDFASKRKEADVRSGIVRNNSLWDKLIFHKIQSSLGGKVRLMITGAAPVSATVLTFLRTALGCQFYEGYGQTECTAGCCLSLPGDWTAGHVGAPMPCNYVKLVDVEEMNYLASKGEGEVCVKGANVFKGYLKDPARTAEALDKDGWLHTGDIGKWLPNGTLKIIDRKKHIFKLAQGEYIAPEKIENIYLRSEAVAQVFVHGESLQAFLIAVVVPDVESLPSWAQKRGLQGSFEELCRNKDINKAILDDLLKLGKEAGLKPFEQVKGIAVHPELFSIDNGLLTPTLKAKRPELRNYFRSQIDELYATIKI

SEQ ID NO: 1532 - protein, 373 aa, Mus musculus
MATSASSHLNKGIKQMYMSLPQGEKVQAMYIWVDGTGEGLRCKTRTLDCEPKCVEELPEWNFDGSSTFQSEGSNSDMYLHPVAMFRDPFRRDPNKLVLCEVFKYNRKPAETNLRHICKRIMDMVSNQHPWFGMEQEYTLMGTDGHPFGWPSNGFPGPQGPYYCGVGADKAYGRDIVEAHYRACLYAGVKITGTNAEVMPAQWEFQIGPCEGIRMGDHLWIARFILHRVCEDFGVIATFDPKPIPGNWNVAGCHTNFSTKAMREENGLKCIEEAIDKLSKRHQYHIRAYDPKGGLDNARALTGFHETSNINDFSAGVANRGASIRIPRTVGQEKKGYFEDRRLRANCDPYAVTEAIVRTCLLNETGDEPFQYKN

SEQ ID NO: 1533 - protein, 532 aa, Mus musculus
MVKRVAIVGAGVSGLASIKCCLEEGLEPTCFERSSDLGGLWRFTEHVEEGRASLYKSVVSNSSREMSCYPDFPFPEDYPNFVPNSLFLEYLKLYSTQFNLQRCIYFNTKVCSITKRPDFAVSGQWEVVTVTNGKQNSAIFDAVMVCTGFLTNPHLPLDSFPGILTFKGEYFHSRQYKHPDIFKDKRVLVVGMGNSGTDIAVEASHLAKKVFLSTTGGAWVISRVFDSGYPWDMIFMTRFQNMLRNLLPTPIVSWLISKKMNSWFNHVNYGVAPEDRTQLREPVLNDELPGRIITGKVFIKPSIKEVKENSVVFNNTPKEEPIDIIVFATGYTFAFPFLDESVVKVEDGQASLYKYIFPAHLPKPTLAVIGLIKPLGSMVPTGETQARWVVQVLKGATTLPPPSVMMEEVNERKKNKHSGFGLCYCKALQTDYITYIDDLLTSINAKPDLRAMLLTDPRLALSIFFGPCTPYHFRLTGPGKWEGARKAILTQWDRTVKVTKTRTIQESPSSFETLLKLFSFLALLIAVFLIFL

SEQ ID NO: 1534 - protein, 534 aa, Mus musculus
MKKKVAIIGAGVSGLAAIRSCLEEGLEPTCFERSDDVGGLWKFSDHIEEGRASIYQSVFTNSSKEMMCFPDFPYPDDFPNFMHHSKLQEYITSFAKEKNLLKYIQFETPVTSINKCPNFSTTGKWEVTTEKHGKKETAVFDATMICSGHHIFPHVPKDSFPGLNRFKGKCFHSRDYKEPGIWKGKRVLVIGLGNSGCDIAAELSHVAQKVTISSRSGSWVMSRVWDDGYPWDMVVLTRFQTFLKNNLPTAISDWWYTRQMNARFKHENYGLVPLNRTLRKEPVFNDELPARILCGMVTIKPNVKEFTETSAVFEDGTMFEAIDCVIFATGYGYAYPFLDDSIIKSRNNEVTLYKGVFPPQLEKPTMAVIGLVQSLGATIPITDLQARWAAQVIKGTCTLPSVNDMMDDIDEKMGEKFKWYGNSTTIQTDYIVYMDELASFIGAKPNLLWLFLKDPRLAVEVFFGPCSPYQFRLVGPGKWSGARNAILTQWDRSLKPMKTRVVSKVQKSCSHFYSRLLRLLAVPVLLIALFLVLI

SEQ ID NO: 1535 - protein, 72 aa, Mus musculus
MARILRASCLLSLLLAGFVPPGRGQEKSKTDCHGGMSGTIYEYGALTIDGEEYIPFKQYAGKYILFVNVASY

SEQ ID NO: 1536 - protein, 267 aa, Mus musculus
MNMSVLTLQEYEFEKQFNENEAIQWMQENWKKSFLFSALYAAFIFGGRHLMNKRAKFELRKPLVLWSLTLAVFSIFGALRTGAYMLYILMTKGLKQSVCDQSFYNGPVSKFWAYAFVLSKAPELGDTIFIILRKQKLIFLHWYHHITVLLYSWYSYKDMVAGGGWFMTMNYGVHAVMYSYYALRAAGFRVSRKFAMFITLSQITQMLMGCVINYLVFNWMQHDNDQCYSHFQNIFWSSLMYLSYLVLFCHFFFEAYIGKVKKATKAE

SEQ ID NO: 1537 - protein, 977 aa, Mus musculus
MERRWPLGLALLLLLLCAPLPPGARAEEVTLMDTSTAQGELGWLLDPPETGWSEVQQMLNGTPLYMYQDCPIQEGGDTDHWLRSNWIYRGEEASRIYVELQFTVRDCKSFPGGAGPLGCKETFNLFYMESDQDVGIQLRRPLFQKVTTVAADQSFTIRDLASDSVKLNVERCSLGHLTRRGLYLAFHNPGSCVALVSVRVFYQRCAETVHGLAHFPDTLPGPGGLVEVAGTCLSHAQISLGSSGTPRMHCSPDGEWLVPVGQCQCEPGYEESSGNVGCTACPTGFYRVDMNTLRCLKCPQHSIAESEGSTICTCENGHYRAPGEGPQVACTRPPSAPQNLSFSTSGTQLSLRWEPPRDTGGRHDIRYSVECLQCRGIAQDGGPCQPCGKGVHFSPAASGLTTSTVQVQGLEPYANYTFTVKSQNRVSGLDSSSPSSASLSINMGHAESLSGLSLKLVKKEPRQLELTWAGSRPRNPGGNLSYELHVLNQDEEWHQMVLEPRVLLTKLQPDTTYIVRVRTLTPLGPGPFSPDHEFRTSPPVSRSLTGGEIVAVIFGLLLGIALLIGIYVFRSRRGQRQRQQRQRERTTNVDREDKLWLKPYVDLQAYEDPAQGALDFAQELDPAWLIVDTVIGEGEFGEVYRGALRLPSQDCKTVAIKTLKDTSPDGYWWNFLREATIMGQFNHPHILRLEGVITKRKPIMIITEFMENGALDAFLKEREDQLAPGQLVAMLLGIASGMNCLSGHNYVHRDLAARNILVNQNLCCKVSDFGLTRLLDDFDGTYETQGGKIPIRWTAPEAIAHRIFTTASDVWSFGIVTWEVLSFGDKPYGEMSNQEVMKSIEDGYRLPPPVDCPAPLYELMKNCWAYDRARRPHFLQLQAHLEQLLTDPHSLRTIANFDPRVTLRLPSLSGSDGIPYRSVSEWLESIRMKRYILHFRSAGLDTMECVLELTAEDLTQMGITLPGHQKRILCSIQGFKD

SEQ ID NO: 1538 - protein, 564 aa, Mus musculus
MAAPRPPPAISVSVSAPAFYAPQKKFAPVVAPKPKVNPFRPGDSEPPVAAGAQRAQMGRVGEIPPPPPEDFPLPPPPLIGEGDDSEGALGGAFPPPPPPMIEEPFPPAPLEEDIFPSPPPPLEEEGGPEAPTQLPPQPREKVCSIDLEIDSLSSLLDDMTKNDPFKARVSSGYVPPPVATPFVPKPSTKPAPGGTAPLPPWKTPSSSQPPPQPQAKPQVQLHVQPQAKPHVQPQPVSSANTQPRGPLSQAPTPAPKFAPVAPKFTPVVSKFSPGAPSGPGPQPNQKMVPPDAPSSVSTGSPQPPSFTYAQQKEKPLVQEKQHPQPPPAQNQNQVRSPGGPGPLTLKEVEELEQLTQQLMQDMEHPQRQSVAVNESCGKCNQPLARAQPAVRALGQLFHITCFTCHQCQQQLQGQQFYSLEGAPYCEGCYTDTLEKCNTCGQPITDRMLRATGKAYHPQCFTCVVCACPLEGTSFIVDQANQPHCVPDYHKQYAPRCSVCSEPIMPEPGRDETVRVVALDKNFHMKCYKCEDCGKPLSIEADDNGCFPLDGHVLCRKCHSARAQT

SEQ ID NO: 1539 - protein, 469 aa, Mus musculus
MCDLIEPQPAEKIGKMKKLRRTLSESFSRIALKKEDTTFDEICVTKMSTRNCQGTDSVIKHLDTIPEDKKVRVQRTQSTFDPFEKPANQVKRVHSENNACINFKSSSAGKESPKVRRHSSPSSPTSPKFGKADSYEKLEKLGEGSYATVYKGKSKVNGKLVALKVIRLQEEEGTPFTAIREASLLKGLKHANIVLLHDIIHTKETLTLVFEYVHTDLCQYMEQHPGGLHPDNVKLFLFQLLRGLSYIHQRYILHRDLKPQNLLISDTGELKLADFGLARAKSVPSHTYSNEVVTLWYRPPDVLLGSTEYSTCLDMWGVGCIFVEMIQGVAAFPGMKDIQDQLERIFLVLGTPNEDTWPGVHSLPHFKPERFTVYSSKSLRQAWNKLSYVNHAEDLASKLLQCSPKNRLSAQAALSHEYFSDLPPRLWELTDMSSIFTVPNVRLQPEAGESMRAFGKNNSYGKSLSNSKH

SEQ ID NO: 1540 - protein, 556 aa, Mus musculus
MAEPSGSPVHVQLSQQAAPVTAAAATAPAAATSAPAPAPAPAPAASAAPAPAPAAAPAPAPAAQAVGWPICRDAYELQEVIGSGATAVVQAALCKPRQERVAIKRINLEKCQTSMDELLKEIQAMSQCSHPNVVTYYTSFVVKDELWLVMKLLSGGSMLDIIKYIVNRGEHKNGVLEEAIIATILKEVLEGLDYLHRNGQIHRDLKAGNILLGEDGSVQIADFGVSAFLATGGDVTRNKVRKTFVGTPCWMAPEVMEQVRGYDFKADMWSFGITAIELATGAAPYHKYPPMKVLMLTLQNDPPTLETGVEDKEMMKKYGKSFRKLLSLCLQKDPSKRPTAAELLKCKFFQKAKNREYLIEKLLTRTPDIAQRAKKVRRVPGSSGHLHKTEDGDWEWSDDEMDEKSEEGKAAASQEKSRRVKEENSEISVNAGGIPEQIQSLSVHDSQAQPNANEDYREGPCAVNLVLRLRNSRKELNDIRFEFTPGRDTADGVSQELFSAGLVDGHDVVIVAANLQKIVDDPKALKTLTFKLASGCDGSEIPDEVKLIGFAQLSVS

SEQ ID NO: 1541 - protein, 559 aa, Mus musculus
MGTVSRAALILACLALASAASEGAFKASDQREMTPERLFQHLHEVGYAAPPSLPQTRRLRVDHSVTSLHDPPLFEEQREVQPPSSPEDIPVYEEDWPTFLNPNVDKAGPAVPQEAIPLQKEQPPPQVHIEQKEIDPPAQPQEEIVQKEVKPHTLAGQLPPEPRTWNPARHCQQGRRGVWGHRLDGFPPGRPSPDNLKQICLPERQHVIYGPWNLPQTGYSHLSRQGETLNVLETGYSRCCPCRSDTNRLDCLKLVWEDAMTQFCEAEFSVKTRPHLCCRLRGEERFSCFQKEAPRPDYLLRPCPVHQNGMSSGPQLPFPPGLPTPDNVKNICLLRRFRAVPRNLPATDAIQRQLQALTRLETEFQRCCRQGHNHTCTWKAWEGTLDGYCERELAIKTHPHSCCHYPPSPARDECFAHLAPYPNYDRDILTLDLSRVTPNLMGQLCGSGRVLSKHKQIPGLIQNMTVRCCELPYPEQACCGEEEKLAFIENLCGPRRNSWKDPALCCDLSPEDKQINCFNTNYLRNVALVAGDTGNATGLGEQGPTRGTDANPAPGSKEE

SEQ ID NO: 1542 - protein, 520 aa, Mus musculus
MPLELTQSRVQKIWVPVDHRPSLPRSCGPKLTNSPTVIVMVGLPARGKTYISKKLTRYLNWIGVPTKVFNVGEYRREAVKQYSSYNFFRPDNEEAMRVRKQCALAALRDVKSYLTKEGGQIAVFDATNTTRERRHMILNFAKENDFKAFFIESVCDDPTVVASNIMEVKISSPDYKDCNSAEAMDDFMKRINCYEASYQPLDPDKCDRDLSLIKVIDVGRRFLVNRVQDHIQSRIVYYLMNIHVQPRTIYLCRHGENEYNLQGKIGGDSSLSSRGKKFANALSKFVEEQNLKDLRVWTSQLKSTIQTAEALRLPYEQWKALNEIDAGVCEELTYEEIRDTYPEEYALREQDKYYYRYPTGESYQDLVQRLEPVIMELERQENVLVICHQAVLRCLLAYFLDKSAEEMPYLKCPLHTVLKLTPVAYGCRVESIYLNVESVSTHRERSEDAKKGPNPLMRRNSVTPLASPEPTKKPRINSFEERVASTSAALPSCLPPEVPTQLPGQNMKSSRSGADSSQKH

SEQ ID NO: 1543 - protein, 912 aa, Mus musculus
MLPKVLLMLLNMFLALQWRVGPHVNLENKPPAQDKVVFGPQPQPVPQPLTPPESPAGDTVVFGPQPQPQAESPGHDDVVFSSQPQPMPQPQPMPEPQPQPEPEPEPQPQPQPQPLAGRQPLPQPLPWPMPQPQPEPEPEPEPEPEPEPEPEPEPEPEPEPEPQPEPQPQPLAGRQPLPQPLPWPLPLPLPEPQPEPQPDPQPEPQPEPQPEPQPEPQPEPQTPGQVQAGRQPRPRPQPEPQPQPEPQPEPQPEPQPQPEPQPEPEPQPEPEPQPEPEPQPEPQPEPQPEPKPEPEPQPEPEPQPEPQPEPQPEPKPEPEPQPEPKPEPEPQPEPEPEPEPEPQPEPEPKPEPQPEPEPEPEPEPEPEPEPEPEPEPEPEPEPESESELDLEPEPEPHPHPHPHPHPHPEPEPEPEPEPEPEPEPEPEPEPEPEPEPEMKSEPQSQLEPQPSGKKLPAKEPELTVDCMTERPGGKLTRASRILNTILSNYDHKLRPGIGEKPTVVTVEVIVNSLGPISTPDMEYSIDIIFHQTWYDERLRYNDTFETLILHGNVVSQLWIPDTFFRNSKRTQEYDITIPNQMALIHKDGKVLYSVRMTIDARCSLHMLNFPMDSHSCPLSFSSFSYDDSEMIYKWENFKLEINAKNTWKLLEFDFTGVNNKTEIISTPFGDFMVMTFFFNVSRRFGFIVFQNYVPSSVTTMLSWVSFWIKIEAAAARASVGVSSVLTMATLGTLSCKNFPRVSYLTALDFYIAICFVLCFCTLLEFAVLNFLTYNNIKRQASLKVYQLPTNSRANAHTRARARTRARARARARQQQEVFVCEIVTYEENAEEGYQWSPRSRRPQCPWRRCGRSYVCFRVLRKYFCMAPGCEGGSWQRGRICIHVYRLDNYSRVLFPITFFFFNVLYWLICLNL

SEQ ID NO: 1544 - protein, 362 aa, Mus musculus
MDVHLFDYAEPGNYSDINWPCNSSDCIVVDTVQCPTMPNKNVLLYTLSFIYIFIFVIGMIANSVVVWVNIQAKTTGYDTHCYILNLAIADLWVVITTPVWVVSLVQHNQWPMGELTCKITHLIFSINLFGSIFFLACMSVDRYLSITYFTGTSSYKKKMVRRVVCILVWLLAFFVSLPDTYYLKAVTSASNNETYCRSFYPEHSIKEWLIGMELVSVILGFAVPFTIIAIFYFLLARAMSASGDQEKHSSRKIIFSYVVVFLVCWLPYHFVVLLDIFSILHYIPFTCQLENVLFTALHVTQCLSLVHCCVNPVLYSFINRNYRYELMKAFIFKYSAKTGLTKLIDASRVSETEYSALEQNTK

SEQ ID NO: 1545 - protein, 248 aa, Mus musculus
MRTPLLPLARSVLLLLVLGSGHYAAALELNDPSSGKGESLSGDHSAGGLELSVGREVSTISEMPSGSELSTGDYDYSEEYDNEPQISGYIIDDSVRVEQVIKPKKNKTEGEKSTEKPKRKKKGGKNGKGRRNKKKKNPCTAKFQNFCIHGECRYIENLEVVTCNCHQDYFGERCGEKSMKTHSEDDKDLSKIAVVAVTIFVSAIILAAIGIGIVITVHLWKRYFREYEGETEERRRLRQENGTVHAIA

SEQ ID NO: 1546 - protein, 125 aa, Mus musculus [sequence omitted]

SEQ ID NO: 1547 - protein, 574 aa, Mus musculus
MESLCGVLGFLLLAAGLPLQAAKRFRDVLGHEQYPDHMREHNQLRGWSSDENEWDEHLYPVWRRGDGRWKDSWEGGRVQAVLTSDSPALVGSNITFVVNLVFPRCQKEDANGNIVYEKNCRNDLGLTSDLHVYNWTAGADDGDWEDGTSRSQHLRFPDRRPFPRPHGWKKWSFVYVFHTLGQYFQKLGRCSARVSINTVNLTAGPQVMEVTVFRRYGRAYIPISKVKDVYVITDQIPVFVTMSQKNDRNLSDEIFLRDLPIVFDVLIHDPSHFLNDSAISYKWNFGDNTGLFVSNNHTLNHTYVLNGTFNLNLTVQTAVPGPCPPPSPSTPPSPSTPPLPSPSPLPTLSTPSPSLMPTGYKSMELSDISNENCRINRYGYFRATITIVEGILEVSIMQIADVPMPTPQPANSLMDFTVTCKGATPMEACTIISDPTCQIAQNRVCSPVAVDGLCLLSVRRAFNGSGTYCVNFTLGDDASLALTSTLISIPGKDPDSPLRAVNGVLISIGCLAVLVTMVTILLYKKHKAYKPIGNCPRNTVKGKGLSVLLSHAKAPFFRGDQEKDPLLQDKPRTL

SEQ ID NO: 1548 - protein, 2318 aa, Mus musculus
MGLGARGRRRRRRLMALPPPPPPMRALPLLLLLAGLGAAAPPCLDGSPCANGGRCTHQQPSLEAACLCLPGWVGERCQLEDPCHSGPCAGRGVCQSSVVAGTARFSCRCLRGFQGPDCSQPDPCVSRPCVHGAPCSVGPDGRFACACPPGYQGQSCQSDIDECRSGTTCRHGGTCLNTPGSFRCQCPLGYTGLLCENPVVPCAPSPCRNGGTCRQSSDVTYDCACLPGFEGQNCEVNVDDCPGHRCLNGGTCVDGVNTYNCQCPPEWTGQFCTEDVDECQLQPNACHNGGTCFNLLGGHSCVCVNGWTGESCSQNIDDCATAVCFHGATCHDRVASFYCACPMGKTGLLCHLDDACVSNPCHEDAICDTNPVSGRAICTCPPGFTGGACDQDVDECSIGANPCEHLGRCVNTQGSFLCQCGRGYTGPRCETDVNECLSGPCRNQATCLDRIGQFTCICMAGFTGTYCEVDIDECQSSPCVNGGVCKDRVNGFSCTCPSGFSGSMCQLDVDECASTPCRNGAKCVDQPDGYECRCAEGFEGTLCERNVDDCSPDPCHHGRCVDGIASFSCACAPGYTGIRCESQVDECRSQPCRYGGKCLDLVDKYLCRCPPGTTGVNCEVNIDDCASNPCTFGVCRDGINRYDCVCQPGFTGPLCNVEINECASSPCGEGGSCVDGENGFHCLCPPGSLPPLCLPANHPCAHKPCSHGVCHDAPGGFRCVCEPGWSGPRCSQSLAPDACESQPCQAGGTCTSDGIGFRCTCAPGFQGHQCEVLSPCTPSLCEHGGHCESDPDRLTVCSCPPGWQGPRCQQDVDECAGASPCGPHGTCTNLPGNFRCICHRGYTGPFCDQDIDDCDPNPCLHGGSCQDGVGSFSCSCLDGFAGPRCARDVDECLSSPCGPGTCTDHVASFTCACPPGYGGFHCEIDLPDCSPSSCFNGGTCVDGVSSFSCLCRPGYTGTHCQYEADPCFSRPCLHGGICNPTHPGFECTCREGFTGSQCQNPVDWCSQAPCQNGGRCVQTGAYCICPPGWSGRLCDIQSLPCTEAAAQMGVRLEQLCQEGGKCIDKGRSHYCVCPEGRTGSHCEHEVDPCTAQPCQHGGTCRGYMGGYVCECPAGYAGDSCEDNIDECASQPCQNGGSCIDLVARYLCSCPPGTLGVLCEINEDDCDLGPSLDSGVQCLHNGTCVDLVGGFRCNCPPGYTGLHCEADINECRPGACHAAHTRDCLQDPGGHFRCVCHPGFTGPRCQIALSPCESQPCQHGGQCRHSLGRGGGLTFTCHCVPPFWGLRCERVARSCRELQCPVGIPCQQTARGPRCACPPGLSGPSCRVSRASPSGATNASCASAPCLHGGSCLPVQSVPFFRCVCAPGWGGPRCETPSAAPEVPEEPRCPRAACQAKRGDQNCDRECNTPGCGWDGGDCSLNVDDPWRQCEALQCWRLFNNSRCDPACSSPACLYDNFDCYSGGRDRTCNPVYEKYCADHFADGRCDQGCNTEECGWDGLDCASEVPALLARGVLVLTVLLPPEELLRSSADFLQRLSAILRTSLRFRLDARGQAMVFPYHRPSPGSESRVRRELGPEVIGSVVMLEIDNRLCLQSAENDHCFPDAQSAADYLGALSAVERLDFPYPLRDVRGEPLEAPEQSVPLLPLLVAGAVFLLIIFILGVMVARRKREHSTLWFPEGFALHKDIAAGHKGRREPVGQDALGMKNMAKGESLMGEVVTDLNDSECPEAKRLKVEEPGMGAEEPEDCRQWTQHHLVAADIRVAPATALTPPQGDADADGVDVNVRGPDGFTPLMLASFCGGALEPMPAEEDEADDTSASIISDLICQGAQLGARTDRTGETALHLAARYARADAAKRLLDAGADTNAQDHSGRTPLHTAVTADAQGVFQILIRNRSTDLDARMADGSTALILAARLAVEGMVEELIASHADVNAVDELGKSALHWAAAVNNVEATLALLKNGANKDMQDSKEETPLFLAAREGSYEAAKLLLDHLANREITDHLDRLPRDVAQERLHQDIVRLLDQPSGPRSPSGPHGLGPLLCPPGAFLPGLKAVQSGTKKSRRPPGKTGLGPQGTRGRGKKLTLACPGPLADSSVTLSPVDSLDSPRPFSGPPASPGGFPLEGPYATTATAVSLAQLGASRAGPLGRQPPGGCVLSFGLLNPVAVPLDWARLPPPAPPGPSFLLPLAPGPQLLNPGAPVSPQERPPPYLAAPGHGEEYPAAGTRSSPTKARFLRVPSEHPYLTPSPESPEHWASPSPPSLSDWSDSTPSPATATNATASGALPAQPHPISVPSLPQSQTQLGPQPEVTPKRQVMA

SEQ ID NO: 1549 - protein, 366 aa, Mus musculus
MFNVTTQVLGSALNGTLSKDNCPDTEWWSWLNAIQAPFLWVLFLLAALENLFVLSVFFLHKNSCTVAEIYLGNLAAADLILACGLPFWAITIANNFDWVFGEVLCRVVNTMIYMNLYSSICFLMLVSIDRYLALVKTMSMGRMRGVRWAKLYSLVIWGCTLLLSSPMLVFRTMREYSEEGHNVTACVIVYPSRSWEVFTNVLLNLVGFLLPLSVITFCTVRILQVLRNNEMKKFKEVQTERKATVLVLAVLGLFVLCWVPFQISTFLDTLLALGVLSGCWDEHAVDVITQISSYVAYSNSGLNPLVYVIVGKRFRKKSREVYRVLCQKGGCMGEPVQMENSMGTLRTSISVERQIHKLQDWAGKKQ

SEQ ID NO: 1550 - protein, 268 aa, Mus musculus; identical to SEQ ID NO: 824

SEQ ID NO: 1551 - protein, 324 aa, Mus musculus
MFCGEYVQGTIFPAPNFNPMMDAQMLGGRLQGFDCNKDMLIDILTQRSNAQRQMIAGTYQSMYGRDLISVLKEQLSSHFKEVMVGLMYPPPSYDAHELWHAMKGPGTDENCLIEILASRTNGEIFQMREAYCLQYSNNLQEDIYSETSGHFRDTLMNLVQANREEGYSDPAMAAQDAMVLWEACQQKTGEHKTMMQMILCNKSYPQLRLVFQEFQNISGQDMVDAINDCTDGYFQELLVAIVRCIQDKPSYFAYKLYRAIHDFGFHNKTVIRILIARSEIDLMTIRKRYKERFGKSLFHDIKNFASGHYEKALLAICAGDVEDY

SEQ ID NO: 1552 - protein, 71 aa, Mus musculus
MRTLCSLLLICCLLFSYTTPAVGSLKSIGYEAELDHCHTNGGYCVRAICPPSARRPGSCFPEKNPCCKYMK

SEQ ID NO: 1553 - protein, 290 aa, Mus musculus
MKPSSEEEGELVQGVGPWDECFEVAVQLALRAGQIIRKALTEEKRVSTKTSAADLVTETDHRVEDLIVSELRKRFPSHRFIAEEATASGAKCVLTHSPTWIIDPIDGTCNFVHRFPTVAVSIGFAVHQELEFGVIHHCTEERLYTGRRGQGAFCNGQRLQVSRETDLAKALVLTEIGPKRDPDTLKVFLSNMERLLHAKAHGVRVIGSSTLALCYLASGAADAYYQFGLHCWDLAAATVIIREAGGIVIDTSGGPLDLMSCRVVAAGTREMAVLIAQALQTINYGRDDEK

SEQ ID NO: 1554 - protein, 316 aa, Mus musculus
MATFVELSTKAKMPLVGLGTWKSSPGQVKEAVKAAIDAGYRHIDCAYVYHNENEVGEAIQEKIKENAVKREDLFIVSKLWATFFEKSLVKKAFDNTLSDLKLDYLDLYLVHWPQGFQAGNALLPKDNKGKVLLSKSTFLDAWEAMEELVDQGLVKALGISNFNHFQIERLLNKPGLKHKPVTNQIESHPYLTQEKLIQYCQSKGIAVTAYSPLGSPDRPYAKPEDPVVMEIPKIKEIAAKHKKTVAQVLIRFHVQRNVVVIPKSVTPSRIQENLQVFDFQLSEEDMAAILSFNRNWRACDLLDARTEEDYPFHEEY

SEQ ID NO: 1555 - protein, 135 aa, Mus musculus
MASLKDLEGKWRLMESHGFEEYMKELGVGLALRKMAAMAKPDCIITCDGNNITVKTESTVKTTVFSCNLGEKFDETTADGRKTETVCTFQDGALVQHQQWDGKESTITRKLKDGKMIVECVMNNATCTRVYEKVQ

SEQ ID NO: 1556 - protein, 265 aa, Mus musculus
MALQIPSLLLSAAVVVLMVLSSPGTEGGDSERHFVYQFMGECYFTNGTQRIRYVTRYIYNREEYVRYDSDVGEHRAVTELGRPDAEYWNSQPEILERTRAELDTVCRHNYEGPETHTSLRRLEQPNVVISLSRTEALNHHNTLVCSVTDFYPAKIKVRWFRNGQEETVGVSSTQLIRNGDWTFQVLVMLEMTPRRGEVYTCHVEHPSLKSPITVEWRAQSESAWSKMLSGIGGCVLGVIFLGLGLFIRHRSQKGPRGPPPAGLLQ

SEQ ID NO: 1557 - protein, 264 aa, Mus musculus
MVWLPRVPCVAAVILLLTVLSPPVALVRDSRPWFLEYCKSECHFYNGTQRVRFLKRYFYNLEENLRFDSDVGEFRAVTELGRPDAENWNSQPEILDEKRAAVDTYCRHNYEIFDNFLVPRRVEPTVTVYPTKTQPLEHHNLLVCSVSDFYPGNIEVRWFRNGKEEKTGIVSTGLVRNGDWTFQTLVMLETVPQSGEVYTCQVEHPSLTDPVTVEWKAQSTSAQNKMLSGVGGFVLGLLFLRAGLFIYFRNQKGQSGLQPTGLLS

SEQ ID NO: 1558 - protein, 476 aa, Mus musculus
MEPLAILALLSLPICSAYPLHGAVTQGHPSMDLAQQYLEKYYNFKKNEKQIFKRKDSSPVVKKIQEMQKFLGLEMTGKLDSNTMELMHKPRCGVPDVGGFSTFPGSPKWRKSHITYRIVNYTPDLPRQSVDSAIEKALKVWEEVTPLTFSRISEGEADIMISFAVGEHGDFYPFDGPGQSLAHAYPPGPGFYGDVHFDDDEKWTLAPSGTNLFLVAAHELGHSLGLFHSDKKESLMYPVYRFSTSPANFHLSQDDIEGIQSLYGAGPSSDATVVPVLSVSPRPETPDKCDPALSFDSVSTLRGEVLFFKDRYFWRRSHWNPEPEFHLISAFWPTLPSDLDAAYEAHNTDSVLIFKGSQFWAVRGNEVQAGYPKGIHTLGFPPTVKKIDAAVFEKEKKKTYFFVGDKYWRFDETRHVMDKGFPRQITDDFPGIEPQVDAVLHEFGFFYFFRGSSQFEFDPNARTVTHILKSNSWLLC

SEQ ID NO: 1559 - protein, 730 aa, Mus musculus
MSPWQPLLLALLAFGCSSAAPYQRQPTFVVFPKDLKTSNLTDTQLAEAYLYRYGYTRAAQMMGEKQSLRPALLMLQKQLSLPQTGELDSQTLKAIRTPRCGVPDVGRFQTFKGLKWDHHNITYWIQNYSEDLPRDMIDDAFARAFAVWGEVAPLTFTRVYGPEADIVIQFGVAEHGDGYPFDGKDGLLAHAFPPGAGVQGDAHFDDDELWSLGKGVVIPTYYGNSNGAPCHFPFTFEGRSYSACTTDGRNDGTPWCSTTADYDKDGKFGFCPSERLYTEHGNGEGKPCVFPFIFEGRSYSACTTKGRSDGYRWCATTANYDQDKLYGFCPTRVDATVVGGNSAGELCVFPFVFLGKQYSSCTSDGRRDGRLWCATTSNFDTDKKWGFCPDQGYSLFLVAAHEFGHALGLDHSSVPEALMYPLYSYLEGFPLNKDDIDGIQYLYGRGSKPDPRPPATTTTEPQPTAPPTMCPTIPPTAYPTVGPTVGPTGAPSPGPTSSPSPGPTGAPSPGPTAPPTAGSSEASTESLSPADNPCNVDVFDAIAEIQGALHFFKDGWYWKFLNHRGSPLQGPFLTARTWPALPATLDSAFEDPQTKRVFFFSGRQMWVYTGKTVLGPRSLDKLGLGPEVTHVSGLLPRRLGKALLFSKGRVWRFDLKSQKVDPQSVIRVDKEFSGVPWNSHDIFQYQDKAYFCHGKFFWRVSFQNEVNKVDHEVNQVDDVGYVTYDLLQCP

SEQ ID NO: 1560 - protein, 380 aa, Mus musculus
MMFSGFNADYEASSSRCSSASPAGDSLSYYHSPADSFSSMGSPVNTQDFCADLSVSSANFIPTVTAISTSPDLQWLVQPTLVSSVAPSQTRAPHPYGLPTQSAGAYARAGMVKTVSGGRAQSIGRRGKVEQLSPEEEEKRRIRRERNKMAAAKCRNRRRELTDTLQAETDQLEDEKSALQTEIANLLKEKEKLEFILAAHRPACKIPDDLGFPEEMSVASLDLTGGLPEASTPESEEAFTLPLLNDPEPKPSLEPVKSISNVELKAEPFDDFLFPASSRPSGSETSRSVPDVDLSGSFYAADWEPLHSNSLGMGPMVTELEPLCTPVVTCTPGCTTYTSSFVFTYPEADSFPSCAAAHRKGSSSNEPSSDSLSSPTLLAL

SEQ ID NO: 1561 - protein, 357 aa, Mus musculus
MFSSVAHLARANPFNAPHLQLVHDGLSGPRSPPAPPRRSRHLAAAAVEEYSCEFGSMKYYALCGFGGVLSCGLTHTAVVPLDLVKCRMQVDPQKYKGIFNGFSITLKEDGVRGLAKGWAPTLIGYSMQGLCKFGFYEVFKALYSNILGEENTYLWRTSLYLASSASAEFFADIALAPMEAAKVRIQTQPGYANTLREAVPKMYKEEGLNAFYKGVAPLWMRQIPYTMMKFACFERTVEALYKFVVPKPRSECTKAEQLVVTFVAGYIAGVFCAIVSHPADSVVSVLNKEKGSTASQVLQRLGFRGVWKGLFARIIMIGTLTALQWFIYDSVKVYFRLPRPPPPEMPESLKKKLGLTE

SEQ ID NO: 1562 - protein, 394 aa, Mus musculus
MSRELHDVDLAEVKPLVEKGESITGLLQEFDVQEQDIETLHGSLHVTLCGTPKGNRPVILTYHDIGMNHKTCYNPLFNSEDMQEITQHFAVCHVDAPGQQDGAPSFPVGYMYPSMDQLAEMLPGVLHQFGLKSVIGMGTGAGAYILTRFALNNPEMVEGLVLMNVNPCAEGWMDWAASKISGWTQALPDMVVSHLFGKEEIHNNVEVVHTYRQHILNDMNPSNLHLFISAYNSRRDLEIERPMPGTHTVTLQCPALLVVGDNSPAVDAVVECNSKLDPTKTTLLKMADCGGLPQISQPAKLAEAFKYFVQGMGYMPSASMTRLMRSRTASGSSVTSLEGTRSRSHTSEGPRSRSHTSEGSRSRSHTSEDARLNITPNSGATGNNAGPKSMEVSC

SEQ ID NO: 1563 - protein, 175 aa, Mus musculus
MEKFSVSAILLLVAISGTLAKDTTVKSGAKKDPKDSRPKLPQTLSRGWGDQLIWTQTYEEALYRSKTSNRPLMVIHHLDECPHSQALKKVFAEHKEIQKLAEQFVLLNLVYETTDKHLSPDGQYVPRIVFVDPSLTVRADITGRYSNRLYAYEPSDTALLYDNMKKALKLLKTEL

SEQ ID NO: 1564 - protein, 193 aa, Mus musculus
MGKQNSKLRPEVMQDLLESTDFTEHEIQEWYKGFLRDCPSGHLSMEEFKKIYGNFFPYGDASKFAEHVFRTFDANGDGTIDFREFIIALSVTSRGKLEQKLKWAFSMYDLDGNGYISKAEMLEIVQAIYKMVSSVMKMPEDESTPEKRTENIFRQMDTNRDGKLSLEEFIRGAKSDPSIVRLLQCDPSSAGQF

SEQ ID NO: 1565 - protein, 363 aa, Mus musculus
MDAARRGDTQPVMWTTGWLLLLPLLLCEGAQALECYSCVQKADDGCSPHRMKTVKCGPGVDVCTEAVGAVETIHGQFSVAVRGCGSGIPGKNDRGLDLHGLLAFFQLQQCSEDRCNAKLNLTLRGLNPAGNESAYEPNGAECYSCVGLSREKCQGSMPPVVNCYNASGRVYKGCFDGNVTLTAANVTVSLPVRGCVQDETCTRDGVTGPGFTLSGSCCQGPRCNADLRNKTYFSPRIPPLVLLPPPTTAAPSTRAQNSSSTTSTAAPTTTTSIIKPTTAQASHTSPHEMDLEVIQEEGASLSGGAAGHGGTAGHGGAAGHQDRSNMEKYPGKGGAQIPAKGGSGTLGSWLSAVLLTVVAGAML

SEQ ID NO: 1566 - protein, 500 aa, Mus musculus
MEPSVLLLLALLVGFLLLLARGHPKSRGNFPPGPRPLPLLGNLLQMDRGGLLKSLIQLREKYGDVFTVHLGPRPVVMLCGTDTIREALVGQAEAFSGRGTVAVVEPTFKEYGVIFANGERWKTLRRFSLATMRDFGMGKRSVEERIQEEAQCLVEELRKSQGAPLDPTFLFQCITANVICSIVFGERFEYTDRQFLRLLELFYQTFSLISSFSSQMFELFSGFLKYFPGAHRQISKNLQELLDYIGHSVERHKATLDPSVPRDFIDIYLLRMEKEKSNQNAEFHHQNLMMSVLSLFFVGTETSSTTLHYGFLLMLKYPHVTEKVQKEIDQVIGSHRLPTLDDRTKMPYSDAVIHEIQRFSDLIPIGVPHRVTKDTLFRGYLLPKNTEVYPILSSALHDPQYFEQPDSFNPDQFLDANGALKKSEAFLPFSTGQIFDQKSVGKRICLGESIARSELFLFFTSILQNFSVASHVAPKDIDLTPKESGIGKIPPTYQICFLAR

SEQ ID NO: 1567 - protein, 492 aa, Mus musculus
MEFSVLLLLALTTGFLIFLVSQSQPKTHGHFPPGPRPLPFLGNLLQMDRRGLLSSFIQLQEKYGDVFTVHLGPRPVVMLCGTDTIREALVNQAEAFSGRGTVAVLDPIVQGYGVIFSSGERWKTLRRFSLATMRDFGMGKRSVEERIKEEAQCLVEELKKYKGAPLNPTFYFQCIVANIICSIVFGERFDYKDHQFLHLLNLIYQTFSLMSSLSSQVFELFSAILKYFPGAHRQISKNLQEILDYIGHSVEKHRATLDPSAPRDFIDTYLLRMEKEKSNHHTEFHHQNLVISVLSLFFAGTETTSTTLRYSFLIMLKYPHVAEKVQKEIDQVIGSHRLPTLDDRTKMPYTDAVIHEIQRFTDLAPIGLPHKVTKDTLFRGYLIPKNTEVYPILSSALHDPRYFEQPDSFNPEHFLDANGALKTNEAFMPFSTGKRICLGEGIARNELFLFFTTILQNFSLASPVAPENIDLIPNNSGATKTPPQYQIHFLSR

SEQ ID NO: 1568 - protein, 367 aa, Mus musculus
MVMEVGILDAGGLRALLREGAAQCLLLDCRSFFAFNAGHIAGSVNVRFSTIVRRRAKGAMGLEHIVPNAELRGRLLAGAYHAVVLLDERSASLDGAKRDGTLALAAGALCREARSTQVFFLQGGYEAFSASCPELCSKQSTPTGLSLPLSTSVPDSAESGCSSCSTPLYDQGGPVEILSFLYLGSAYHASRKDMLDALGITALINVSANCPNHFEGHYQYKSIPVEDNHKADISSWFNEAIDFIDSIKDAGGRVFVHCQAGISRSATICLAYLMRTNRVKLDEAFEFVKQRRSIISPNFSFMGQLLQFESQVLAPHCSAEAGSPAMAVLDRGTSTTTVFNFPVSIPVHPTNSALNYLKSPITTSPSC

SEQ ID NO: 1569 - protein, 1612 aa, Mus musculus
MRILQSFLACVQLLCLCRLDWAYGYYRQQRKLVEEIGWSYTGALNQKNWGKKYPICNSPKQSPINIDEDLTQVNVNLKKLKFQGWEKASLENTFIHNTGKTVEINLTNDYYLSGGLSEKVFKASKITFHWGKCNVSSEGSEHSLEGQKFPLEMQVYCFDADRFSSFEEAVKGKGRLRRLSILFEVGVEENLDYKAIIDGTESVSRFGKQAALDPFVLQNLLQNSTDKYYIYNGSLTSPPCTDTVEWIVFKDTVSISESQLAVFCEVLTMQQSGYVMLMDYLQNNFREQQYKFSRQVFSSYTGKEEIHEVVCSSEPENVQADPENYTSLLVTWERPRVVYDAMIEKFAVLYQPLAGNDQAKHEFLTDGYQDLGAILNNLLPNMSYVLQIVAVCSNGLYGKYSDQLIVDMPTEDAELDLFPELIGTEEIIKEEEYGKDNEEDTGLNPGRDSVTNQIRKKEPQVSTTTHYNHMGTKYNEAKTNRSPTRGSEFSGKSDVPNTSPNSTSQHVAEFETERGISLPSQTGTNLPPHNVEGTSASLNSGSKTLFIFPQMNLSGTAESLNTVPITEYKEVSADVSEEENFLTDFKLDTGADDSSGSSPSTSTVPFFSDNLSHGYITSSDMPEAITYDVLKPGSTRNAPEDSAPSGSEESLKDPSLEGSVWFPGSTDLTTQSETGSGRESFLQVNSTDIQIDESRETTESFSPDATVSQDPSVTDMGMPHYSTFAYLPTEVTPQAFTPSSRPLDLAPTINILHSQTTQPVYNGETPLQPSYSSEVFPLATPLLLDNQTLNTTPAASSSDSALHATPVSPSVGVSFESILSSYDDAPLLPFSSASFSSEMFRHLHTVSQTLPQVTSAAERDELSLHASLLVARGDLLLEPSLVQYSDVASHQATTRAASDTLGFGSESAVFYKTSMVSQIESPRSDVVMHAYSSGPEPSYTVEGSHHVPTVSYSSAMPLHGSVDVSDQGSLLINPSHISMPESSFITPTASLLQPPPALSGDGEWSGASSDSELLLPDADGLRTLNISSPVSVAEFTYTTSVFADGIKPLSKSEMMYGNETELKMSSFSDMAYPSKSTVVPKMSDVVHKWSESLKETSVSISSMKSVFPESLVYPTTKGFEQGVSHVPEIIFPVQPTHTASQASGDTWLKPGLSANSEAAFSDTASREVVHPSTQPLLYEAATPFNTEALLQPSFQASDVDTLLKTALPSVPSDPILAGTPQVEQSSSSVSHPMASESGSSESMLHFTSVPILDISPSKVHSTPLQGLTVPHSSKKFSEQGLLKSKSPQQVLPSLFSNDEFFQNAHLDVSQAYPPKGRHAFVTPVLSIDEPQNTLINKLVYSEDIFSSTEISITDKVLTGLPTLASDVLSSTDHSVPLGSGPISLTMVSPNRDDSVTTAKLLLPSTATSKLTQSARSDADLVGGGEDGDDYDDDDYDDIDRGRFPVNKCMSCLPYRESREKVMNDSDTQESSLVDQSDPISPLLFENTEEENGGTGVTRVDKSPPPSMLPQNHNDGKEDSDIQMGSAVLPHTPGSKAWAVLTSDEESGSGQGTSDSLNDNETSTDFSFPDVNEKDTDGVLETDDTGIAPGSPRSSTPSVTSGHSGVSNSSEAG

SEQ ID NO: 1570 - protein, 291 aa, Mus musculus
MHPARPALWAAALTALTLLRGPPVAELAAGAVGGPVVRCEPCDARAVSQCAPPPTAPACTELVREPGCGCCLTCALREGDACGVYTERCGTGLRCQPRPAEQYPLRALLNGRGFCANASAAGSLSTYLPSQPAPGNISESEEEHNAGSVESQVVPSTHRVTDSKFHPLHAKMDVIKKGHARDSQRYKVDYESQSTDTQNFSSESKRETEYGPCRREMEDTLNHLKFLNVLSPRGVHIPNCDKKGFYKKKRCRPSKGRKQSFCWCVDKYGQRLPGYDTKGKDDVHCLSVQSQ

SEQ ID NO: 1571 - protein, 238 aa, Mus musculus
MTWDGLPTQPLLMLLMLLFAAGSGSALAGCPGCGPGMQTGCRGGCVEEEDAGSPADGCTEAGGCLRREGQPCGVYSPKCAPGLQCQPRENEETPLRALLIGQGRCQRARGPSEETTKESKPQGGASRSRDTNHRDRQKNPRTSAAPIRPNPVQDSEMGPCRRHLDSVLQQLQTEVFRGGARGLYVPNCDLRGFYRKQQCRSSQGNRRGPCWCVDPMGQPLPVSPDGQGSTQCSARSSG

SEQ ID NO: 1572 - protein, 113 aa, Mus musculus
MEAWLGSLLFLATMVIASKAVCSIENREIFPNQMSDDCMDADGNKHFLNTPWKKNCTWCSCDKTSITCCTNATRPLSYDKDNCDVQFHPENCTYSVVDRKNPGKTCRVDSWTM

SEQ ID NO: 1573 - protein, 382 aa, Mus musculus
MEQLSSANTLFTLELFHTLKESSPTGNIFFSPFSISSSLAMVFLGAKGSTAAQLSKTLHFDSVEDIHSCFQSLTAEVSKLGASHTLKLANRLYGEKTYNFLPEFLASTQKMYSADLAAVDFQHASEDARKEINQWVKGQTEGKIPELLAKGVVDSMTKLVLVNAIYFKGIWEEQFMTRETINAPFRLNKKDTKTVKMMYQKKKFPFGYISDLKCKVLEMPYQGGELSMVILLPEDIEDESTGLKKIEEQLTLGKLHEWTKHENLRNIDVHVKLPRFKMEESYILNSNLCCLGVQDLFSSGKADLSGMSGSRDLFVSKIVHKSFVDVNEQGTEAAAATGGIIQVLCEKMPTPQEVFTVDHPFLFFIRHNPTANMIFFGRVCSP

SEQ ID NO: 1574 - protein, 324 aa, Mus musculus; identical to SEQ ID NO: 1448

SEQ ID NO: 1575 - protein, 402 aa, Mus musculus
MQMSSALACLILGLVLVSGKGFTLPLRESHTAHQATDFGVKVFQQVVQASKDRNVVFSPYGVSSVLAMLQMTTAGKTRRQIQDAMGFKVNEKGTAHALRQLSKELMGPWNKNEISTADAIFVQRDLELVQGFMPHFFKLFQTMVKQVDFSEVERARFIINDWVERHTKGMINDLLAKGAVDELTRLVLVNALYFSGQWKTPFLEASTHQRLFHKSDGSTVSVPMMAQSNKFNYTEFTTPDGLEYDVVELPYQRDTLSMFIAAPFEKDVHLSALTNILDAELIRQWKGNMTRLPRLLILPKFSLETEVDLRGPLEKLGMPDMFSATLADFTSLSDQEQLSVAQALQKVRIEVNESGTVASSSTAFVISARMAPTEMVIDRSFLFVVRHNPTETILFMGQVMEP

SEQ ID NO: 1576 - protein, 375 aa, Mus musculus
MDALRLANSAFAVDLFKQLCERDPAGNILFSPICLSTSLSLAQVGTKGDTANEIGQVLHFENVKDVPFGFQTVTSDVNKLSSFYSLKLVKRLYIDKSLNPSTEFISSTKRPYAKELETVDFKDKLEETKGQINSSIKELTDGHFEDILSENSISDQTKILVVNAAYFVGKWMKKFPESETKECPFRISKTDTKPVQMMNLEATFCLGNIDDISCKIIELPFQNKHLSMLIVLPKDVEDESTGLEKIEQQLNPETLLQWTNPSTMANAKVKLSLPKFKVEKMIDPKASLESLGLKSLFNESTSDFSGMSETKGVSLSNVIHRVCLEITEDGGESIEVPGSRILQHKDEFNADHPFIYIIRHNKTRNIIFFGKFCSP

SEQ ID NO: 1577 - protein, 292 aa, Mus musculus
MEDSMDMDMSPLRPQNYLFGCELKADKDYHFKVDNDENEHQLSLRTVSLGAGAKDELHIVEAEAMNYEGSPIKVTLATLKMSVQPTVSLGGFEITPPVVLRLKCGSGPVHISGQHLVAVEEDAESEDEDEEDVKLLGMSGKRSAPGGGNKVPQKKVKLDEDDEDDDEDDEDDEDDDDDDFDEEETEEKVPVKKSVRDTPAKNAQKSNQNGKDLKPSTPRSKGQESFKKQEKTPKTPKGPSSVEDIKAKMQASIEKGGSLPKVEAKFINYVKNCFRMTDQEAIQDLWQWRKSL

SEQ ID NO: 1578 - protein, 89 aa, Mus musculus
MPSELEKALSNLIDVYHNYSNIQGNHHALYKNDFKKMVTTECPQFVQNINIENLFRELDINSDNAINFEEFLAMVIKVGVASHKDSHKE

SEQ ID NO: 1579 - protein, 138 aa, Mus musculus
MPNFSGNWKIIRSENFEEMLKALGVNMMMRKIAVAAASKPAVEIKQENDTFYIKTSTTVRTTEINFKIGEEFEEQTVDGRPCKSLVKWESGNKMVCEQRLLKGEGPKTSWSRELTNDGELILTMTADDVVCTRVYVRE

SEQ ID NO: 1580 - protein, 96 aa, Mus musculus
MKIAITITVVMLSICCSSASSDICPGFLQVLEALLMESESGYVASLKPFNPGSDLQNAGTQLKRLVDTLPQETRINIMKLTEKILTSPLCKQDLRF

SEQ ID NO: 1581 - protein, 415 aa, Mus musculus
MHLLCFLSLACSLLAAALIPSPREAPATVAAFESGLGFSEAEPDGGEVKAFEGKDLEEQLRSVSSVDELMSVLYPDYWKMYKCQLRKGGWQQPTLNTRTGDSVKFAAAHYNTEILKSIDNEWRKTQCMPREVCIDVGKEFGAATNTFFKPPCVSVYRCGGCCNSEGLQCMNTSTGYLSKTLFEITVPLSQGPKPVTISFANHTSCRCMSKLDVYRQVHSIIRRSLPATLPQCQAANKTCPTNYVWNNYMCRCLAQQDFIFYSNVEDDSTNGFHDVCGPNKELDEDTCQCVCKGGLRPSSCGPHKELDRDSCQCVCKNKLFPNSCGANREFDENTCQCVCKRTCPRNQPLNPGKCACECTENTQKCFLKGKKFHHQTCSCYRRPCANRLKHCDPGLSFSEEVCRCVPSYWKRPHLN

SEQ ID NO: 1582 - protein, 192 aa, Mus musculus
MQAIKCVVVGDGAVGKTCLLISYTTNAFPGEYIPTVFDNYSANVMVDSKPVNLGLWDTAGQEDYDRLRPLSYPQTDVFLICFSLVSPASYENVRAKWFPEVRHHCPSTPIILVGTKLDLRDDKDTIEKLKEKKLAPITYPQGLALAKDIDSVKYLECSALTQRGLKTVFDEAIRAVLCPQPTRQQKRPCSLL

SEQ ID NO: 1583 - protein, 466 aa, Mus musculus
MSTRSVSSSSYRRMFGGSGTSSRPSSNRSYVTTSTRTYSLGSALRPSTSRSLYSSSPGGAYVTRSSAVRLRSSVPGVRLLQDSVDFSLADAINTEFKNTRTNEKVELQELNDRFANYIDKVRFLEQQNKILLAELEQLKGQGKSRLGDLYEEEMRELRRQVDQFTNDKARVEVERDNLAEDIMRLREKLQEEMLQREEAESTLQSFRQDVDNASLARLDLERKVESLQEEIAFLKKLHDEEIQELQAQIQEQHVQIDVDVSKPDLTAALRDVRQQYESVAAKNLQEAEEWYKSKFADLSEAANRNNDALRQAKQESNEYRRQVQSLTCEVDALKGTNESLERQMREMEENFALEAANYQDTIGRLQDEIQNMKEEMARHLREYQDLLNVKMALDIEIATYRKLLEGEESRISLPLPTFSSLNLRETNLESLPLVDTHSKRTLLIKTVETRDGQVINETSQHHDDLE

SEQ ID NO: 1584 - protein, 261 aa, Mus musculus
MSDTEEQEYEEEQAEDEEAVEEEEAPEEPEPVAEREERPKPSRPVVPPLIPPKIPEGERVDFDDIHRKRMEKDLLELQTLIDVHFEQRKKEEEELIALKDRIERRRAERAEQQRFRTEKERERQAKLAEEKMRKEEEEAKKRAEDDAKKKKVLSNMGAHFGGYLVKAEQKRGKRQTGREMKLRILSERKKPLNIDYMGEDQLREKAQELSEWIHQLESEKFDLMEKLKQQKYEINVLYNRISHAQKFRKGAGKGRVGGRWK

SEQ ID NO: 1585 - protein, 467 aa, Mus musculus
MSHQHTLPVTVPAVVQGPLKTVCSPDHIQQEQAKQPTPHPTQCQVFTEIQEKGFPKHEEKRPNPVKDLPDQKCEHQQQPGPQKQQLQVKKSQQELQEQELHLEKQQLPQEPQGLLCLEQQQQQEPQMQEQHLRQQQQQQQQQQQQQQQQQQQETQEQGLCLGQKQQQQQQDMLVPQELHLRQHQEKLQDPELHLGQQQKTPEEQKLIPGEKQQELHLGQRHQEPQEQELHLGQKQKQKLHEPELQLGKQQHQKPSEPELPLGKQQQESPEPELPLGKQQQQESPEPELQLGKQQQSHEPDMAGDQKEKQKLHKPELYLRKQQYQESPDPELSLGKQQHQECQEPELQLEEKQHQKPPEPELHLGKQQESHEPDMAEDLEEKQKLGEPELHLGKQQQQQIEREGYQGPKSLGQSLKQEKASREQQLDYSHLEQEKELSDQPLDQALVKKGKQLERKKHELENRTQQEK

SEQ ID NO: 1586 - protein, 284 aa, Mus musculus
MDAIKKKMQMLKLDKENALDRAEQAEADKKAAEDRSKQLEDELVSLQKKLKGTEDELDKYSEALKDAQEKLELAEKKATDAEADVASLNRRIQLVEEELDRAQERLATALQKLEEAEKAADESERGMKVIESRAQKDEEKMEIQEIQLKEAKHIAEDADRKYEEVARKLVIIESDLERAEERAELSEGKCAELEEELKTVTNNLKSLEAQAEKYSQKEDKYEEEIKVLSDKLKEAETRAEFAERSVTKLEKSIDDLEDELYAQKLKYKAISEELDHALNDMTSI

SEQ ID NO: 1587 - protein, 153 aa, Mus musculus
MSSHQQKQPCTAPPQLHEQQVKQPCQPPPPEPCVSQVKTPCDTKVPEPCHPKAPEPCHPKAPEPCHPKAPEPCHPKAPEPCHPKAPEPCHPKAPEPCHPKAPEPCHPKAPEPCHPKVPEPCLPKAPEPCQPIVPEPCPSTVTPILAQQKTKQK

SEQ ID NO: 1588 - protein, 452 aa, Mus musculus
MATTFLQTSSTFGGSSTRGASLRAGGGSFGGGSLYGGGGSRSISASSARFVSSGAGGGFGGGMSCGFGGGFGGGFGGGFGGGFGDFGGGDGGLLSGNEKVTMQNLNDRLASYLDKVRALEQANTELEVKIRDWYQKQSPASPDRDYSHYFKTMEEIRDKILAATIDNSRVVLEIDNARLAADDFRLKYENELTLRQGVEADINGLRRVLDELTLARTDLEMQIEQLNEELAYLKKNHEEEMKEFSSQLAGQVNVEMDAAPGVDLTRMLAEMREQYEAIAEKNRRDVEAWFFSKTEELNKEVASNTEMIQTSKTEITDLRRTLQGLEIELQSQLSMKAGLENSLAEVECRYATQLQQIQGVITGLETQLSELHSQMEAQNQEYNMLLDIKTRLEQEIATYRNLLEDQDAKMAGIGVREGSSGGGGSSSSSSNFHISVEESVDGKVVSSRKREI

SEQ ID NO: 1589 - protein, 109 aa, Mus musculus
MPQESVLPHLLVQHLTGGLIDPKRTGRIPVPQAVLCGMISEDLGQLLQDESGYEKDLTDPITKERLSYKEAMGRCRKDPLSGLLLLPAMLEGYRCYRAASPTLPRSCVR

SEQ ID NO: 1590 - protein, 165 aa, Mus musculus; identical to SEQ ID NO: 875

SEQ ID NO: 1591 - protein, 1117 aa, Mus musculus
MADGPRCKRRKQANPRRNNVTNYNTVVEANSDSDDEDKLHIVEEESITDAADCEGGMPDDELPADQTVLPGGSDRGGGAKNCWQDNVKDNECDSDAENEQNHDPNVEEFLQQQDTAVIYPEAPEEDQRQGTPEASSHDENGTPDAFSQLLTCPYCDRGYKRFTSLKEHIKYRHEKNEDNFSCSLCSYTFAYRTQLERHMTSHKSGREQRHVTQSGGNRKFKCTECGKAFKYKHHLKEHLRIHSGEKPYECPNCKKRFSHSGSYSSHISSKKCISLMPVNGRPRSGLKTSQCSSPSLSTSPGSPTRPQIRQKIENKPLQEPLSVNQIKTEPVDYEFKPIVVASGINCSTPLQNGVFSSGGQLQATSSPQGVVQAVVLPTVGLVSPISINLSDIQNVLKVAVDGNVIRQVLETNQASLASKEQEAVSASPIQQGGHSVISAISLPLVDQDGTTKIIINYSLEQPSQLQVVPQNLKKEIPAPTNSCKSEKLPEDLTVKSETDKSFEGARDDSTCLLCEDCPGDLNALPELKHYDPECPAQPPPPAPATEKPESSASSAGNGDLSPSQPPLKNLLSLLKAYYALNAQPSTEELSKIADSVNLPLDGVKKWFEKMQAGQIPGQSPDPPSPGTGSVNIPTKTDEQPQPADGNEPQEDSTRGQSPVKIRSSPVLPVGSAMNGSRSCTSSPSPLNLCSARNPQGYSCVAEGAQEEPQVEPLDLSLPKQQGELLERSTVSSVYQNSVYSVQEEPLNLSCAKKEPQKDSCVTDSEPVVNVVPPSANPINIAIPTVTAQLPTIVAIADQNSVPCLRALAANKQTILIPQVAYTYSATVSPAVQEPPVKVIQPNGNQDERQDTSSEGVSTVEDQNDSDSTPPKKKTRKTENGMYACDLCDKIFQKSSSLLRHKYEHTGKRPHECGICRKAFKHKHHLIEHMRLHSGEKPYQCDKCGKRFSHSGSYSQHMNHRYSYCKRGAEDRDAMEQEDAGPEVLPEVLATEHVGARASPSQADSDERESLTREEDEDSEKEEEEEDKEMEELQEGKECENPQGEEEEEEEEEEEEEEEEEEEVEADEAEHEAAAKTDGTVEVGAAQQAGSLEQKASESEMESESESEQLSEEKTNEA

SEQ ID NO: 1592 - protein, 301 aa, Mus musculus
MDVLASYSIFQELQLVHDTGYFSALPSLEETWQQTCLELERYLQTEPRRISETFGEDLDCFLHASPPPCIEESFRRLDPLLLPVEATICEKSSAVDILLSRDKLLSETCLSLQPTSSSLDSYTAVNQAQLNAVTSLTPPSSPELSRHLVKTSQTLSAVDGTVTLKLVAKKASLSPVKVGGVAAAAAVTPAGAVKSGQSDSEQGGGGADTCPENKKRVHRCQFNGCRKVYTKSSHLKAHQRTHTGEKPYKCSWEGCEWRFARSDELTRHYRKHTGAKPFKCNHCDRCFSRSDHLALHMKRHI

SEQ ID NO: 1593 - protein, 228 aa, Mus musculus
MIDEILSKETCDYFEKLSLYSVCPSLVVRPKPLHSCTGSPSLRAYPLPSVITRQPTVISHLVPTGSGLTPVLTRHPVAAAEAAAAAAETPGGEALASSESETEQPTPRQKKPRRSRTIFTELQLMGLEKKFQKQKYLSTPDRLDLAQSLGLTQLQVKTWYQNRRMKWKKMVLKGGQEAPTKPKGRPKKNSIPTSEEIEAEEKMNSQAQSQELLESSEREASSEPPPLS

SEQ ID NO: 1594 - protein, 176 aa, Mus musculus
CTTFLQLLVLFPHSVLSLLRSPPPVLRIMKVASGSAAAAAGPSCSLKAGRTAGEVVLGLSEQSVAISRCAGTRLPALLDEQQVNVLLYDMNGCYSRLKELVPTLPQNRKVSKVEILQHVIDYIRDLQLELNSESEVGTTGGRGLPVRAPLSTLNGEISALAAEAACVPADDRILCR

SEQ ID NO: 1595 - protein, 397 aa, Mus musculus
MNWHFPFFILTTVTLYSVHSQFNSLSLEELGSNTGIQVFNQIIKSRPHENVVVSPHGIASILGMLQLGADGKTKKQLSTVMRYNVNGVGKVLKKINKAIVSKKNKDIVTVANAVFLRNGFKMEVPFAVRNKDVFQCEVQNVNFQDPASASESINFWVKNETRGMIDNLLSPNLIDGALTRLVLVNAVYFKGLWKSRFQPESTKKRTFVAGDGKSYQVPMLAQLSVFRSGSTRTPNGLWYNFIELPYHGESISMLIALPTESSTPLSAIIPHITTKTIDSWMNTMVPKRMQLVLPKFTAVAQTDLKEPLKALGITEMFEPSKANFTKITRSESLHVSHILQKAKIEVSEDGTKASAATTAILIARSSPPWFIVDRPFLFSIRHNPTGAILFLGQVNKP

SEQ ID NO: 1596 - protein, 1436 aa, Mus musculus
MKDIDMGKEYIIPSPGYRSDRDRSAVPGQHRDPEEPRFRRTRSLECQDALETAARVEGLSLDISVHSHLQILDEEHSKGKYHHGLSVLKPFRTTTKHQHPVDNAGLFSYMTFSWLSPLARVVHKKGELLMEDVWPLSKYESSDVNCRRLERLWQEELNEVGPDAASLRRVVWIFCRTRLILSIVCLMITQLAGFSGPAFMVKHLLEYTQATESNLQCSLLLVLGLLLTEIVRSWSLALTWALNYRTGVRLRGAILTMAFKKILKLKNIKEKSLGELINICSNDGQRMFEAAAVGSLLAGGPVVAILGMIYNVIILGPTGFLGSAVFILFYPAMMFVSRLTAYFRRKRVAATDDRVQKMNEVLTYIKFIKMYAWVKAFSQCVQKIREEERRILEKAGYFQSITVGVAPIVVVIASVVTFSVHMTLGFHLTAAQAFTVVTVFNSMTFALKVTPFSVKSLSEASVAVDRFKSLFLMEEVHMIKNKPASPHIKIEMKNATLAWDSSHSSIQNSPKLTPKMKKDKRATRGKKEKSRQLQHTEHQAVLAEQKGHLLLDSDERPSPEEEEGKQIHTGSLRLQRTLYNIDLEIEEGKLVGICGSVGSGKTSLVSAILGQMTLLEGSIAVSGTFAYVAQQAWILNATLRDNILFGKEFDEERYNSVLNSCCLRPDLAILPNSDLTEIGERGANLSGGQRQRISLARALYSDRSIYILDDPLSALDAHVGNHIFNSAIRKRLKSKTVLFVTHQLQYLVDCDEVIFMKEGCITERGTHEELMNLNGDYATIFNNLLLGETPPVEINSKKEATGSQKSQDKGPKPGSVKKEKAVKSEEGQLVQVEEKGQGSVPWSVYWVYIQAAGGPLAFLVIMVLFMLNVGSTAFSTWWLSYWIKQGSGNSTVYQGNRSFVSDSMKDNPFMQYYASIYALSMAVMLILKAIRGVVFVKGTLRASSRLHDELFRRILRSPMKFFDTTPTGRILNRFSKDMDEVDVRLPFQAEMFIQNVILVFFCVGMIAGVFPWFLVAVGPLLILFSLLHIVSRVLIRELKRLDNITQSPFLSHITSSIQGLATIHAYNKRQEFLHRYQELLDDNQAPFFLFTCAMRWLPVRLDIISIALITSTGLMIVSGMARSLSAYAGLAISYAVQLIGLFQFTVRLASETEARFTSVERINHYIKTLSLEAPARIKNKAPPHDWPQEGEVTFENAEMRYRENLPLVLKKVSFTIKPKEKIGIVGRTGSGKSSLGMALFRLVELSGGCIKIDGIRISDIGLADLRSKLAIIPQEPVLFSGTVRSNLDPFNQYTEDQIWDALERTHMKECIAQLPLKLESEVMENGDNFSVGERQLLCIARALLRHCKILILDEATAAMDTETDLLIQETIREAFADCTMLTIAHRLHTVLGSDRIMVLAQGQVVEFDTPSVLLSNDSSRFYAMFAAAENKVAVKG

SEQ ID NO: 1597 - protein, 382 aa, Mus musculus
MGDWSALGKLLDKVQAYSTAGGKVWLSVLFIFRILLLGTAVESAWGDEQSAFRCNTQQPGCENVCYDKSFPISHVRFWVLQIIFVSVPTLLYLAHVFYVMRKEEKLNKKEEELKVAQTDGVNVEMHLKQIEIKKFKYGIEEHGKVKMRGGLLRTYIISILFKSVFEVAFLLIQWYIYGFSLSAVYTCKRDPCPHQVDCFLSRPTEKTIFIIFMLVVSLVSLALNIIELFYVFFKGVKDRVKGRSDPYHATTGPLSPSKDCGSPKYAYFNGCSSPTAPLSPMSPPGYKLVTGDRNNSSCRNYNKQASEQNWANYSAEQNRMGQAGSTISNSHAQPFDFPDDSQNAKKVAAGHELQPLAIVDQRPSSRASSRASSRPRPDDLEI

SEQ ID NO: 1598 - protein, 265 aa, Mus musculus
MKKEVCSVAFFKAVFAEFLATLIFVFFGLGSALKWPSALPTILQISIAFGLAIGTLAQALGPVSGGHINPAITLALLIGNQISLLRAIFYVAAQLVGAIAGAGILYWLAPGNARGNLAVNALSNNTTPGKAVVVELILTFQLALCIFSSTDSRRTSPVGSPALSIGLSVTLGHLVGIYFTGCSMNPARSFGPAVVMNRFSPSHWVFWVGPIVGAVLAAILYFYLLFPSSLSLHDRVAVVKGTYEPEEDWEDHREERKKTIELTAH

SEQ ID NO: 1599 - protein, 309 aa, Mus musculus
MVGFKATDVPPTATVKFLGAGTAACIADLITFPLDTAKVRLQIQGESQGLVRTAASAQYRGVLGTILTMVRTEGPRSLYNGLVAGLQRQMSFASVRIGLYDSVKQFYTKGSEHAGIGSRLLAGSTTGALAVAVAQPTDVVKVRFQAQARAGGGRRYQSTVEAYKTIAREEGIRGLWKGTSPNVARNAIVNCAELVTYDLIKDTLLKANLMTDDLPCHFTSAFGAGFCTTVIASPVDVVKTRYMNSALGQYHSAGHCALTMLRKEGPRAFYKGFMPSFLRLGSWNVVMFVTYEQLKRALMAAYQSREAPF

SEQ ID NO: 1600 - protein, 638 aa, Mus musculus
MPVKKYLLKCLHRLQKGPGYTYKELLVWYCNNTNTHGPKRIICEGPKKKAMWFLLTLLFACLVCWQWGVFIQTYLSWEVSVSLSMGFKTMNFPAVTVCNSSPFQYSKVKHLLKDLDELMEAVLEKILAPEASHSNTTRTLNFTIWNHTPLVLIDERNPDHPVVLNLFGDSHNSSNPAPGSTCNAQGCKVAMRLCSANGTVCTLRNFTSATQAVTEWYILQATNIFSQVLPQDLVGMGYAPDRIILACLFGTEPCSHRNFTPIFYPDYGNCYIFNWGMTEETLPSANPGTEFGLKLILDIGQEDYVPFLASTAGARLMLHEQRTYPFIREEGIYAMAGTETSIGVLVDKLQRKGEPYSPCTMNGSDVAIKNLYSVYNTTYSIQACLHSCFQDHMIRNCSCGHYLYPLPEGEKYCNNRDFPDWAYCYLNLQMSVTQRETCLSMCKESCNDTQYKMTISMADWPSEASEDWILHVLSQERDQSSNITLSRKGIVKLNIYFQEFNYRTIEESPANNIVWLLSNLGGQFGFWMGGSVLCLIEFGEIIIDFIWITIIKLVASCKGLRRRRPQAPYTGPPPTVAELVEAHTNFGFQPDTTSCRPHGEVYPDQQTLPIPGTPPPNYDSLRLQPLDTMESDSEVEAI

SEQ ID NO: 1601 - protein, 339 aa, Mus musculus
MEISDDVTNPEQLWKMKPKGNLEDDSYSTKDSGETSMLKRPGLSHLQHAVHVDAFDCPSELQHTQEFFPNWRLPVKVAAIISSLTFLYTLLREIIYPLVTSREQYFYKIPILVINKVLPMVAITLLALVYLPGELAAVVQLRNGTKYKKFPPWLDRWMLAKKQFGLLSFFFAVLHAVYSLSYPMRRSYRYKLLNWAYKQVQQNKEDAWVEHDVWRMEIYVSLGIVGLAILALLAVTSIPSVSDSLTWREFHYIQSKLGIVSLLLGTVHALVFAWNKWVDVSQFVWYMPPTFMIAVFLPTLVLICKIALCLPCLRKKILKIRCGWEDVSKINRTEMASRL

SEQ ID NO: 1602 - protein, 895 aa, Mus musculus
MVVPEFRSPQCRALCTKLLLTLWVFSFVGEACKKVTFHVPSTLEVDKIIGRVSLKECLSSADGIMPSDPDFRVLDDGSVYPTRAVVLSDEKRSFTIQLSDSKMQTQKEIPVILEHKKKVLKKRHTKETVLRRSKRRWAPIPCSMQENSLGPFPLFLQQVQSDAAQNYTVFYSISGRGADQEPLNWFFIERDTGNLYCTRPVDREEYDVFDLIAYASTADGYSADLPLPLPIKIEDENDNYPLFTEAIYAFEVPEGSRLGTVVGTVCATDKDEPDTMHTRLKYSILEQTPPSPGLFSVHPDTGVITTVSHYMDREVVDKYKLIMKVQDMNGQFFGLISTSTCIITVQDSNDNAPTFRQNTYETAVEENTYNVEILRIPVDDKDMINTANWKANFTILKGNENGWFKITTDPVTNEGVLCVVKPLDYEENRQVTLETGVNNEAPFIKDVANRIPTMNRAMVTVHVKDQNEGPECKPPEQYVRIKENSAVGSKINGYKAYDPETKNSNGLRYKKLQDPKDWVSIEEVSGLLTISKTLDREIIAPRNDMYNITVMAIDQEGKSCTGTLAVNIEDVNDNAPEIIQDYIVICKPKMGYTDISAVDPDEPIHGPPFQFNLANTSPEVNRIWTINQVNDTAARLSYQKTADVQIYNVPVTVKDRAGQSATKILRVNLCDCTHPSQCPLRSRSAGITLGKWAYLAILLGIALLFSVLLTLVCGVVTARKGKHFPEDLAHENLIISNTEAPGDDRVCSAWIHHPHCQQLQPRLLWYNGSGMRNGGQETIEMMKGHQTLDSCRVAGHHHTLDSGRGGHMDTDNCRYTYSEWHSFTQPRLGEKLHVCNQNENHIPSQDYVLTYNYEGRGSPAGSVGCCSEKQEEEGLDFLNNLEPKFLTLAKTCTKR

SEQ ID NO: 1603 - protein, 388 aa, Mus musculus
MRARRGLLRLPRRSLLAALFFFSLSSSLLYFVYVAPGIVNTYLFMVQAQGILLRDNVRTIGAQVYEQVVRSAYAKRNSSLNDSDYPLDLNHSEAFPPTTTFLPEDFTYFANHPCPERLPSMKGPIDINMSEIAMDDIHELFSRDPAIKLGGHWKPADCVPRWKVAILIPFRNRHEHLPVLLRHLLPMLQRQALQFAFYVIEQVGTQPFNRAMLFNVGFQEAMKDLDWDCLIFHDVDHIPESDRNYYGCGQMPRHFATKLDKYMYLLPYTEFFGGVSGLTVEQFRKINGFPNAFWGWGGEDDDLWNRVQNAGYSVSRPEGDTGKYKSIPHHHRGEVQFLGRYALLRKSKERQGLDGLNNLNYSANVTYDALYKNITVNLTPELAQVTEY

SEQ ID NO: 1604 - protein, 221 aa, Mus musculus
MAGKPVLHYFDGRGRMEPIRWLLAAAGVEFEEKFLKTRDDLARLRSDGSLMFQQVPMVEIDGMKLVQTKAILNYIASKYNLYGKDMKERAIIDMYTEGVADLEIMILYYPHMPPEEKEASLAKIKEQTRNRYFPAFEKVLKSHGQDYLVGNRLRSADIALVELLYHVEELDPGVVDNFPLLKALRSRVSNLPTVKKFLQPGSQRKPFDDAKCVESAKKIFS

SEQ ID NO: 1605 - protein, 267 aa, Mus musculus; identical to SEQ ID NO: 1536

SEQ ID NO: 1606 - protein, 670 aa, Mus musculus
MESQASENGSQTSSGVTDDYSSWYIEEPLGAEEVQPEGVIPLCQLTAPPALLHACLASLSFLVLLLLALLVRRRRLWPRCGHRGLGLPSPVDFLAGDLSWTVPAAVFVVLFSNLCLLLPDENPLPFLNLTAASSPDGEMETSRGPWKLLALLYYPALYYPLAACASAGHQAAFLLGTVLSWAHFGVQVWQKAECPQDPKIYKHYSLLASLPLLLGLGFLSLWYPVQLVQSLRHRTGAGSQGLQTSYSEKYLRTLLCPKKLDSCSHPASKRSLLSRAWAFSHHSIYTPQPGFRLPLKLVISATLTGTATYQVALLLLVSVVPTVQKVRAGINTDVSYLLAGFGIVLSEDRQEVVELVKHHLWTVEACYISALVLSCASTFLLLIRSLRTHRANLQALHRGAALDLDPPLQSIHPSRQAIVSWMSFCAYQTAFSCLGLLVQQVIFFLGTTSLAFLVFVPLLHGRNLLLLRSLESTWPFWLTVALAVILQNIAANWIFLRTHHGYPELTNRRMLCVATFLLFPINMLVGAIMAVWRVLISSLYNTVHLGQMDLSLLPQRAASLDPGYHTYQNFLRIEASQSHPGVIAFCALLLHAPSPQPRPPLAPQDSLRPAEEEEGMQLLQTKDLMAKGAGHKGSQSRARWGLAYTLLHNPSLQAFRKAALTSAKANGTQP

SEQ ID NO: 1607 - protein, 229 aa, Mus musculus
MPSLWDRFSSSSSSSSSSRTPAADRPPRSAWGSAAREEGLDRCASLESSDCESLDSSNSGFGPEEDSSYLDGVSLPDFELLSDPEDEHLCANLMQLLQESLSQARLGSRRPARLLMPSQLVSQVGKELLRLAYSEPCGLRGALLDVCVEQGKSCHSVAQLALDPSLVPTFQLTLVLRLDSRLWPKIQGLLSSANSSLVPGYSQSLTLSTGFRVIKKKLYSSEQLLIEEC

SEQ ID NO: 1608 - protein, 317 aa, Mus musculus
MSSLGGGSQDAGGSSSSSNTNSSSGSGQKAGGTDKSTAVAATTAPTSVADDAPPPERRNKSGIISEPLNKSLRRSRPLSHYSSFGSSGGGGSMMGVESADKAAAAAASLLANGHDLAAAMAVDKSNPTSKHKSGAVASLLSKAERATELAAEGQLTLQQFAQSTEMLKRVVQEHLPLMSEAGAGLPDMEAVAGAEALNGQSDFPYLGAFPINPGLFIMTPAGVFLAESALHMAGLAEYPMQGELASAISSGKKKRKRCGMCAPCRRRINCEQCSSCRNRKTGHQICKFRKCEELKKKPSAALEKVMLPSGAAFRWFQ

SEQ ID NO: 1609 - protein, 428 aa, Mus musculus
MGPPPGIGVYCRGGCGAARLLAWCFLLALSPHAPGSRGAEAVWTAYLNVSWRVPHTGVNRTVWELSEEGVYGQDSPLEPVSGVLVPPDGPGALNACNPHTNFTVPTVWGSTVQVSWLALIQRGGGCTFADKVHLASERGASGAVIFNFPGTRNEVIPMSHPGAGDIVAIMIGNLKGTKILQSIQRGIQVTMVIEVGKKHGPWVNHYSIFFVSVSFFIITAATVGYFIFYSARRLRNARAQSRKQRQLKADAKKAIGKLQLRTLKQGDKEIGPDGDSCAVCIELYKPNDLVRILTCNHIFHKTCVDPWLLEHRTCPMCKCDILKALGIEVDVEDGSVSLQVPVSNEASNTASPHEEDSRSETASSGYASVQGADEPPLEEHAQSANENLQLVNHEANSVAVDVVPHVDNPTFEEDETPDQEAAVREIKS

SEQ ID NO: 1610 - protein, 159 aa, Mus musculus
MTAVGKLLLGILADFKWINTLYLYVATLIITGLALCAIPFAKSYVTLAILSGILGFLTGNWSIFPYVTTKTVGIDKLAHAYGILMFFAGLGNSLGPPIVGWFYDWTQTYDIAFYFSGFCVLLGGFILLLAILPCWDMCNKKLPKPAVPTTFFYKVASNV

SEQ ID NO: 1611 - protein, 270 aa, Mus musculus
MPGKHQQFQDPEVGCCGKYFLFGFNIVFWVLGALFLAIGLWAWGEKGVLSNISALTDLGGLDPVWLFVVVGGVMSVLGFAGCIGALRENTFLLKFFSVFLGLIFFLELAAGILAFVFKDWIRDQLNLFINNNVKAYRDDLDLQNLIDFAQEYWSCCGARGPNDWNLNIYFNCTDLNPSRERCGVPFSCCVRDPAEDVLNTQCGYDIRLKLELEQEGSIYTKGCVGQFEKWLQDNLIVVAGVLVGIALLQIFGLCLAQNLVSDIKAVKANW

SEQ ID NO: 1612 - protein, 771 aa, Mus musculus
MCPCGLQAPHQPGQPGFKFTVAESCDRIKDEFQFLQAQYHSLKVEYDKLANEKTEMQRHYVMYYEMSYGLNIEMHKQTEIAKRLNTILAQIMPFLSQEHQQQVAQAVERAKQVTMTELNAIIGQQQLQAQHLSHATHGPPVQLPPHPSGLQPPGIPPVTGSSSGLLALGALGSQAHLAVKDEKNHHELDHRERESSTNNSVSPSESLRASEKHRGSADYSMEAKKRKAEEKDSLSRYDSDGDKSDDLVVDVSNEDPATPRVSPAHSPPENGLDKARGLKKDAPTSPASVASSSSTPSSKTKDLGHNDKSSTPGLKSNTPTPRNDAPTPGTSTTPGLRSMPGKPPGMDPIGIMASALRTPITLTSSYPAPFAMMSHHEMNGSLTSPSAYAGLHNIPSQMSAAAAAAAAAYGRSPMVSFGAVGFDPHPPMRATGLPSSLASIPGGKPAYSFHVSADGQMQPVPFPHDALAGPGIPRHARQINTLSHGEVVCAVTISNPTRHVYTGGKGCVKIWDISQPGSKSPISQLDCLNRDNYIRSCKLLPDGGTLIVGGEASTLTIWDLASPTPRIKAELTSSAPACYALAISPDAKVCFSCCSDGNIAVWDLHNQTLVRQFQGHTDGASCIDISHDGTKLWTGGLDNTVRSWDLREGRQLQQHDFTSQIFSLGYCPTGEWLAVGMESSNVEVLHHTKPDKYQLHLHESCVLSLKFAYCGKWFVSTGKDNLLNAWRTPYGASIFQSKESSSVLSCDISADDKYIVTGSGDKKATVYEVIY

SEQ ID NO: 1613 - protein, 299 aa, Mus musculus
MKRAHPDYSSSDSELDETIEVEKESADENGNLSSALCSMSPTTSSQVLARKRRRGIIEKRRRDRINNSLSELRRLVPSAFEKQGSAKLEKAEILQMTVDHLKMLHTAGGKGYFDAHALAMDYRSLGFRECLAEVARYLSIIEGLDASDPLLVRLVSHLNNYASQREAASGAHGGLGHIPWGSAFGHHPHIAHPLLLPQNGHGNAGTAASPTEPHHQGRLASAHPEAPALRAPPSGGLGPVLPVVTSASKLSPPLLSSVASLSAFPFSFSSFHLLSPSTPTQAANLGKPYRPWGTEIGAF

SEQ ID NO: 1614 - protein, 428 aa, Mus musculus
MMPLPSSRSCHCSEPCKISLAVSPILDSFVHTVLRYIIWMKVTSANILQLDVQPSTYDQELVVRIPLDMVAGLNTPLIKTIVEFQMSTEVQALIRVERSKSGPAHLNLSDCSSNESTLRLSLLHKLSFVVNSLAKNVMNLLVPALPQIVKNHLCPVIQQAFDDMYEDFLRLTTAPIALSPGALEFGLLSPAIQDSNILLNLKAKLLDSQARVTNWFNNSATSLMETTPDRAPFSLTVRQDLVNAIVTTLVPKEELVILLRFVIPDVARQLQMDIKEINAEAANKLGPTQMLKIFTHSTPHIVLNEGSARAAQSVVLEVFPTNTDVRPFFSLGIEASYEAQFFTEDNRLMLNFNNVSIERIKLMISDIKLFDPEVLKDTLTKILEYTLLPNENGKLRTGVPMSMSKALGYEKAMWSVSKGALKLTPASS

SEQ ID NO: 1615 - protein, 278 aa, Mus musculus
MFLVGSLVVLCGLLAHSTAQLAGLPLPLGQGPPLPLNQGPPLPLNQGQLLPLAQGLPLAVSPALPSNPTDLLAGKFTDALSGGLLSGGLLGILENIPLLDVIKSGGGNSNGLVGGLLGKLTSSVPLLNNILDIKITDPQLLELGLVQSPDGHRLYVTIPLGLTLNVNMPVVGSLLQLAVKLNITAEVLAVKDNQGRIHLVLGDCTHSPGSLKISLLNGVTPVQSFVDNLTGILTKVLPELIQGKVCPLVNGILSGLDVTLVHNIAELLIHGLQFVIKV

SEQ ID NO: 1616 - protein, 456 aa, Mus musculus
MTTDEGTSNNGENPAATMTEQGEDITTKKDRGVLKIVKRVGTSDEAPMFGDKVYVHYKGMLSDGKKFDSSHDRKKPFAFSLGQGQVIKAWDIGVSTMKKGEICHLLCKPEYAYGSAGHLQKIPSNATLFFEIELLDFKGEDLFEDSGVIRRIKRKGEGYSNPNEGATVKVHLEGCCGGRTFDCRDVVFVVGEGEDHDIPIGIDKALVKMQREEQCILYLGPRYGFGEAGKPKFGIDPNAELMYEVTLKSFEKAKESWEMDTKEKLTQAAIVKEKGTVYFKGGKYTQAVIQYRKIVSWLEMEYGLSEKESKASESFLLAAFLNLAMCYLKLREYNKAVECCDKALGLDSANEKGLYRRGEAQLLMNDFESAKGDFEKVLAVNPQNRAARLQISMCQRKAKEHNERDRRVYANMFKKFAERDAKEEASKAGSKKAVEGAAGKQHESQAMEEGKAKGHV

SEQ ID NO: 1617 - protein, 117 aa, Mus musculus
MSAGSSCSQTPSRAIPTRRVALGDGVQLPPGDYSTTPGGTLFSTTPGGTRIIYDRKFLMECRNSPVAKTPPKDLPAIPGVTSPTSDEPPMQASQSQLPSSPEDKRAGGEESQFEMDI

SEQ ID NO: 1618 - protein, 3067 aa, Mus musculus
MQTRLPRALAALGVALLLSSIEAEVDPPSDLNFKIIDENTVHMSWERPVDPIVGYRITVDPTTDGPTKEFTLAASTTETLLSDLIPETQYVVTITSYNEVEESVPVIGQLTIQTGGPTKPGEKKPGKTEIQKCSVSAWTDLVFLVDGSWSVGRNNFKYILDFIVALVSAFDIGEEKTRVGVVQYSSDTRTEFNLNQYYRREDLLAAVKKIPYKGGNTMTGDAIDYLVKNTFTESAGSRAGFPKVGIIITDGKSQDEVEIPARELRNIGVEVFSLGIKAADAKELKQIASTPSLNHVFNVANFDAIVDIQNEIISQVCSGVDEQLGELVSGEEVIEPPSNLVVTELSSKYIRLSWDPSPSAVTGYKILLTPMAAGSRHHALSVGPQTTTLNVRDLTADTEYQISVFAMKGLTSSEPTSVMEKTQPKTQPMKVQVECSRGVDIKADIVFLVDGSYSIGTANFVKVRAFLEVLAKSFEISPNRVQISLVQYSRDPHTEFTLKEFNRVEDIIKAINTFPYRGGSTNTGKAMTYVREKIFVPNKGSRSNVPKVMILITDGESSDAFRDPAIKLRNSDVEIFAVGVKDAVRSELEAIASPPAETHVFTVEDFDAFQRISFVLTQSICLRIEQELAAIKKKAYVPPKDLRFTQVTANSFKAEWSPPGDNVFSYHVTYKDANGDDEVTVVEPASSTSVVLNSLRPETLYLVNVTAEYEDGFSVPITGEETTAEVKGVPRNLKVTDETTDSFKLTWSQAPGRVLRYRIRYRPVSGGESKEVSTPANQRRKTLENLTPDTKYEISVIAEYPSGPGSPLTGNAATEEVRGNPRDLRVSDATTSTLKLSWSRAPGKVKQYLVTYTPAAGGETQEVTVRGDTTTTMLRKLKEGTQYDLSVTALYASGAGEALSGKGSTLEERGSPQNLVTKDITDTSIGAYWTSAPGMVRGYRVSWKSLYDDIEAGETTLNGDAIHTMIENLQPETKYKISVFATYSSGEGEPVTGDATTELSQDSKILRVDEETEHTMRVTWKAAPGKVVNYRVVYRPQGGGRQMVAKVPPTVTSTVLKRLQPQTTYDITVLPMYKTGEGKLRQRSGTTASRFKSPRNLKTSDPTMSSFRVTWEPAPGEVKGYKVTFHPTGDDRRLGELVLGPYDNTVVLEELRAGTTYRVNVFGMFDGGESLPLVGQEMTTLSDTTVTPFLSSGMDCLTRAEADIVLLVDGSWSIGRANFRTVRSFISRIVEVFEIGPKRVQIALAQYSGDPRTEWQLNAHRDKKSLLQAVANLPNKGGNTLTGMALNFIRQQSFKTQAGMRPRARKIGVLITDGKSQDDVEAPSKKLKDEGVELFAIGIKNADEVELKMIATDPDDTHAYNVADFESLSKIVDDLTINLCNSVKGPGDLEAPTNLVISERTHRSFRVSWTPPSDSVDRYKVEYYPVSGGKRQEFYVSRLDTSTVLKDLKPETDYVVNVYSVVEDEYSEPLKGTEKALPVPVVSLNIYDVGPTTMHVQWQPVGGATGYTVSYQPTRSPEGTKPKEMRVEPTVNDVQLTGLLPNTEYEVTVQAVLYDLTSEPAKAREVTLPLPRPQDVKLRDVTHSTMNVVWEPVLGKVRKYIVRYKTPDEEFKEVEVDRSRASTILKDLSSQTQYTVSVSAVYDEGTSPPATAYDTTRRVPAPTNLQFTEVTPESFRGTWDHGASDVSLYRITWAPVGNPDKMETILNGDENTLVFENLNPNTPYEVSITAIYPDESESEDLSGTERTLRLIPLTTQAPKSGPRNLQVYNATSNSLTIKWDPASGRVQKYRITYQPSTGEGNEQTITVGGRQNSVLLQKLKPDTPYTITVYSQYPGGEGGRMTGRGKTKPLNTVRNLRVYDPSTSSLSVRWDHAEGNPRQYKLFYAPTSGGPEELVPIPGNTNYAILRNLQPDTPYTITVVPVYTEGDGGRTSDTGRTLVRGLSRNIQVYNPTPNSLDVRWDPAPGPVQQYRIVYSPVAGTRPSESIVVPGNTRTVHLERLIPDTPYSVYIVALYSDGEGNPSPSQGRTLPRSGPRNIRVFGETTNSLSVAWDHADGPVQQYRIIYSPTVGDPIDEYTTVPGRRNNVILQPLQPDTPYKITVIAIYEDGDGGHLTGNGRTVGLLPPQNIHIFDEWYTRFRVSWDPSPSPVLGYKIVYKPVGSNEPMEAFVGEVTSYTLHNLNPSTTYDVSVYAQYDSGLSVPLTDQGTTLYLNVTDLKTYQVGWDTFCVKWSPHRAATSYRLKLSPADGTRGQEITVRGSETSHCFTGLSPEAEYGVTVFVQTPNLEGPGVPIKEQTTVKPTEAPTEPPTPSPPPTIPPARDVCKGAKADIVFLTDASWSIGDDNFNKVVKFIFNTVGAFDEVNPAGIQVSFVQYSDEVKSEFKLNTYNDKALALGALQNIRYRGGNTRTGKALTFIKEKVLTWESGMRKNVRVLGVVTDGRSQDEVKKAAFVIQQSGFSVFVVGVADVDYNELANIASKPSERHVFIVDDFESFEKIEDNLITFVCETATSSCPLIYQDGYTSPGFKMLEAYNLTEKNFASVQGVSLESGSFPDSSAYRLQKNAFINQPTAELHPNGLPPSYTIILLFRLLPETPSDPFAIWQITDRDYRPQVGVIADPSSKTLSFFNKDTRGEVQTVTFDTDEVKTLFYGSFHKVHIVVTSKSVKIYIDCYEIIEKDIKEAGNITTDGYEILGKLLKGERKSATFQIQSFDIVCSPVWTSRDRCCDIPSRRDEAKCPALPNACTCTQDSVGPPGPPGPAGGPGAKGPRGERGINGAVGPPGPRGDTGPPGPQGPPGPQGPNGLSIPGEQGRQGMKGDAGEPGLPGRTGTPGLPGPPGPMGPPGDRGFTGKDGAMGPRGPPGPGSPGVTGPSGKPGKPGDHGRPGQSGLKGEKGDRGDIASQNMMRAVARQVCEQLISGQMSRFNQMLNQIPNDYHSSRNQPGPPGPPGPPGSAGARGEPGPGGRPGFPGTPGMQGPPGERGLPGEKGERGTGSQGPRGPPGPPGPQGESRTGPPGSTGSRGPPGPPGRPGNSGIRGPPGPPGYCDSSQCASIPYNGQGYPGMLLPS

SEQ ID NO: 1619 - protein, 570 aa, Mus musculus
  MISC_FEATURE (365)..(365): "Xaa" = any amino acid
MTKARDQTHQEGCCGSLANYLTSAKFLLYLGHSLSTWGDRMWHFAVSVFLVELYGNSLLLTAVYGLVVAGSVLVLGAIIGDWVDKNARLKVAQTSLVVQNVSVILCGIILMMVFLHKNELLTMYHGWVLTVCYILIITIANIANLASTATAITIQRDWIVVVAGENRSRLADMNATIRRIDQLTNILAPMAVGQIMTFGSPVIGCGFISGWNLVSMCVEYFLLWKVYQKTPALAVKAALKVEESELKQLTSPKDTEPKPLEGTHLMGEKDSNIRELECEQEPTCASQMAEPFRTFRDGWVSYYNQPVFLAGMGLAFLYMTVLGFDCITTGYAYTQGLSGSILSILMGASAITGIMGTVAFTWLRXKCGLVRTGLFSGLAQLSCLILCVISVFMPGSPLDLSVSPFEDIRSRFVNVEPVSPTTKIPETVFTTEMHMSNMSNVHEMSTKPIPIVSVSLLFAGVIAARIGLWSFDLTVTQLLQENVIESERGIINGVQNSMNYLLDLLHFIMVILAPNPEAFGLLVLISVSFVAMGHLMYFRFAQKTLGNQIFVCGPDEKEVTDENQPNTSVV

SEQ ID NO: 1620 - protein, 1171 aa, Mus musculus
MDALIIPVTMEVPCDSRGQRMWWAFLASSMVTFFGGLFIILLWRTLKYLWTVCCHCGGKTKEAQKINNGSSQADGTLKPVDEKEEVVAAEVGWMTSVKDWAGVMISAQTLTGRVLVVLVFALSIGALVIYFIDSSNPIESCQNFYKDFTLQIDMAFNVFFLLYFGLRFIAANDKLWFWLEVNSVVDFFTVPPVFVSVYLNRSWLGLRFLRALRLIQFSEILQFLNILKTSNSIKLVNLLSIFISTWLTAAGFIHLVENSGDPWENFQNNQALTYWECVYLLMVTMSTVGYGDVYAKTTLGRLFMVFFILGGLAMFASYVPEIIELIGNRKKYGGSYSAVSGRKHIVVCGHITLESVSNFLKDFLHKDRDDVNVEIVFLHNISPNLELEALFKRHFTQVEFYQGSVLNPHDLARVKIESADACLILANKYCADPDAEDASNIMRVISIKNYHPKIRIITQMLQYHNKAHLLNIPSWNWKEGDDAICLAELKLGFIAQSCLAQGLSTMLANLFSMRSFIKIEEDTWQKYYLEGVSNEMYTEYLSSAFVGLSFPTVCELCFVKLKLLMIAIEYKSANRESRILINPGNHLKIQEGTLGFFIASDAKEVKRAFFYCKACHDDVTDPKRIKKCGCRRPKMSIYKRMRRACCFDCGRSERDCSCMSGRVRGNVDTLERTFPLSSVSVNDCSTSFRAFEDEQPPTLSPKKKQRNGGMRNSPNTSPKLMRHDPLLIPGNDQIDNMDSNVKKYDSTGMFHWCAPKEIEKVILTRSEAAMTVLSGHVVVCIFGDVSSALIGLRNLVMPLRASNFHYHELKHIVFVGSIEYLKREWETLHNFPKVSILPGTPLSRADLRAVNINLCDMCVILSANQNNIDDTSLQDKECILASLNIKSMQFDDSIGVLQANSQGFTPPGMDRSSPDNSPVHGMLRQPSITTGVNIPIITELVNDTNVQFLDQDDDDDPDTELYLTQPFACGTAFAVSVLDSLMSATYFNDNILTLIRTLVTGGATPELEALIAEENALRGGYSTPQTLANRDRCRVAQLALLDGPFADLGDGGCYGDLFCKALKTYNMLCFGIYRLRDAHLSTPSQCTKRYVITNPPYEFELVPTDLIFCLMQFDHNAGQSRASLSHSSHSSQSSSKKSSSVHSIPSTANRPNRPKSRESRDKQNRKEMVYR

SEQ ID NO: 1621 - protein, 697 aa, Mus musculus
MAPWPELENAQPNPGKFIEGASGPQSSIPAKDKEASKTNDNGTPVAKTELLPSYSALVLIEEHPEGTDPWDLPELQDTGIRWSERDTKGKTLCIFQGVGKFILLLGFLYLFVCSLDVLSSAFQLVGGKVAGQFFSNNSIMSNPVAGLVIGVLVTLMVQSSSTSSSIIVSMVASSLLTVRAAIPIIMGANIGTSITNTIVALMQAGDRNEFRRAFAGATVHDFFNWLSVFVLLPLEAATHYLEILTNLVLETFKFQNGEDAPDILKVITDPFTKLIIQLDKKVIQQIAMGDSAAQNKSLIKIWCKSITNVTEMNVTVPSTDNCTSPSYCWTDGIQTWTIQNVTQKENIAKCQHIFVNFSLPDLAVGIILLTVSLVVLCGCLIMIVKLLGSVLRGQVATVIKKTLNTDFPFPFAWLTGYLAILVGAGMTFIVQSSSVFTSAMTPLIGIGVISIERAYPLTLGSNIGTTTTAILAALASPGNTLRSSLQIALCHFFFNISGILLWYPIPFTRLPIRLAKGLGNISAKYRWFAVFYLIFFFFVTPLTVFGLSLAGWPVLVGVGVPIILLLLLVLCLRMLQFRCPRILPLKLRDWNFLPLWMHSLKPWDNVISLATTCFQRRCCCCCRVCCRVCCMVCGCKCCRCSKCCRDQGEEEEEKEQDIPVKASGAFDNAAMSKECQDEGKGQVEVLSMKALSNTTVF

SEQ ID NO: 1622 - protein, 782 aa, Mus musculus
EERLIRKFEAENISNYTALLLSQDGKTLYVGAREALFALNSNLSFLPGGEYQELLWSADADRKQQCSFKGKDPKRDCQNYIKILLPLNSSHLLTCGTAAFSPLCAYIHIASFTLAQDEAGNVILEDGKGHCPFDPNFKSTALVVDGELYTGTVSSFQGNDPAISRSQSSRPTKTESSLNWLQDPAFVASATSPESLGSPIGDDDKIYFFFSETGQEFEFFENTIVSRVARVCKGDEGGERVLQQRWTSFLKAQLLCSRPDDGFPFNVLQDVFTLNPNPQDWRKTLSIGVFTSQWHRGTTEGSAICVFTMNDVQKAFDGLYKKVNRETQQWYTETHQVPTPRPGACITNSARERKINSSLQLPDRVLNFLKDHFLMDGQVRSRLLLLQPRARYQRVAVHRVPGLHSTYDVLFLGTGDGRLHKAVTLSSRVHIIEELQIFPQGQPVQNLLLDSHGGLLYASSHSGVVQVPVANCSLYPTCGDCLLARDPYCAWTGSACRLASLYQPDLASRPWTQDIEGASVKELCKNSSYKARFLVPGKPCKQVQIQPNTVNTLACPLLSNLATRLWVHNGAPVNASASCRVLPTGDLLLVGSQQGLGVFQCWSIEEGFQQLVASYCPEVMEEGVMDQKNQRDGTPVIINTSRVSAPAGGRDSWGADKSYWNEFLVMCTLFVFAMVLLFLFFLYRHRDGMKLFLKQGECASVHPKTRPIVLPPETRPLNGVGPPSTPLDHRGYQALSDSSPGPRVFTESEKRPLSIQDSFVEVSPVCPRPRVRLGSEIRDSVV

SEQ ID NO: 1623 - protein, 162 aa, Mus musculus
MSQAELSTCSAPQTQRIFQEAVRKGNTQELQSLLQNMTNCEFNVNSFGPEGQTALHQSVIDGNLELVKLLVKFGADIRLANRDGWSALHIAAFGGHQDIVLYLITKAKYAASGGVIATRTPAPGPHPRRLCCTFPPTTSVCARFAGPRGNRAKSLRPRPRPK

SEQ ID NO: 1624 - protein, 99 aa, Mus musculus
MRLLAAALLLLLLALCVRALDGSKCKCSRKGPKIRYSDVKKLEMKPKYPHCEEKMVIVTTKSMSRYRGQEHCLHPKLQSTKRFIKWYNAWNEKRRVYEE

SEQ ID NO: 1625 - protein, 391 aa, Mus musculus
MTEPETLALLDMKEPETPEKSPPQALVLQSEEEGGTESPGTESLRVGSSVGSPIVREGPEDGPDSTISEAATLPWGTDPHPSAPLPDPPGWRDIEPEPLESEAPTKSEEPFKEDANLLPEKTVRAFVPIDLQCIERKPQEERILHRDAGPGELRNFLPARLSHPEPPERKWAEAVVRPPGRSCGGCGSCGGREALRAVASVVAALIFFPCLLYGAYAFLPFDAPRLPTMSSRLVYTLRCGVFATFPIVLGLLVYGLSLLCFSALRPFGEPRREVEIHRQYVAQSVQLFILYFFNLAVLSTYLPQDTLKLLPLLTGLFAISRLIYWLTFAVGRSFRGFGYGLTFLPLLAMLVWNLYYMFVVEPERMLTASESRLDYPDHARSVSDYRPRSWG

SEQ ID NO: 1626 - protein, 414 aa, Mus musculus
MLFRGTSLAYSLLVISFLTPRSSAGQNCLTKSLEDVVIDIQSSLSKGIRGNEPIHLATQEDCIGACCSTKDIAGDKACNLMIFDTRKTDRQPNCYLFFCPSEDACPLKPAKGLVTYRLIRDFPLTSANSSLQQLTQGEFLLLDHSSPGATPGFRTPAGYPKPTGLSWSDRSSLKSTAPLHLRKHIKADETSMQLPEEKSHSQSLQLPSELKMAHLLPKTVPTPPTTVAVAPLRNVSATLKPELLLTSISVTAKTLKQKEATTASPVTTVTSKLPGVPGSTSFTPVVTHQAALTNTFQAHTDSKGILETMPFQGGSTLTSDPRHGKSSTSESSITNKTASWEDRRVSVGSASLNKGPKSQHGLSFEKWLLIGTLLCGVLFLVIGLVLLGRMLVEALRRKRYSRLDYLINGIYVDI

SEQ ID NO: 1627 - protein, 112 aa, Mus musculus
MAQAPTVIVTQPGFVRAPQNSNWQTSLCDCFSDCGVCLCGTFCFTCLGCQVAADMNECCLCGTTVAMRTLYRTRYGIPGSICDDYMVTLFCPVCSVCQLKRDINRRRAMNAF

SEQ ID NO: 1628 - protein, 524 aa, Mus musculus
MAAAKKAVLGPLVGAVDQGTSSTRFLVFNSKTAELLSHHQVEIKQEFPREGWVEQDPKEILQSVYECIEKTCEKLGQLNIDISNIKAIGVSNQRETTVVWDKVTGEPLYNAVVWLDLRTQSTVENLSKRIPGNNNFVKSKTGLPLSTYFSAVKLRWLLDNVKKVQEAVEENRALFGTIDSWLIWSLTGGIHGGVHCTDVTNASRTMLFNIHSLEWDKELCEFFGIPMEILPNVRSSSEIYGLMKAGALEGVPISGCLGDQSAALVGQMCFQDGQAKNTYGTGCFLLCNTGHKCVFSEHGLLTTVAYKLGRDKPVYYALEGSVAIAGAVIRWLRDNLGIIKSSEEIEKLAKEVGTSYGCYFVPAFSGLYAPYWEPSARGIICGLTQFTNKCHIAFAALEAVCFQTREILDAMNRDCGIPLSHLQVDGGMTSNKILMQLQADILYIPVVKPSMPETTALGAAMAAGAAEGVGVWSLEPEDLSAVTMERFEPQINAEESEIRYSTWKKAVMKSIGWVTTQSPESGIP

SEQ ID NO: 1629 - protein, 278 aa, Mus musculus; identical to SEQ ID NO: 1615

SEQ ID NO: 1630 - protein, 156 aa, Mus musculus
MSPHSEEIYATELSETMIWQLQRKKYRVLGINEWQNTGFQYDVISCLNLLDRCDQPLTLLKDIRSVLEPTQGRVILALVLPFHPYVENVGGKWEKPSEILEIEGQNWEEQVNSLPEVFRKAGFVVEAFTRLPYLCEGDMYNDYYVLDDAVFVLRPV

SEQ ID NO: 1631 - protein, 227 aa, Mus musculus
MFKRMAEFGPDSGGRVKGVTIVKPIVYGNVARYFGKKREEDGHTHQWTVYVKPYRNEDMSAYVKKIQFKLHESYGNPLRVVTKPPYEITETGWGEFEIIIKIFFIDPNERPVTLYHLLKLFQSDTNAMLGKKTVVSEFYDEMIFQDPTAMMQQLLTTSRQLTLGAYKHETEFAELEVKTREKLEAAKKKTSFEIAELKERLKASRETINCLKNEIRKLEEDDQTKDI

SEQ ID NO: 1632 - protein, 895 aa, Mus musculus; identical to SEQ ID NO: 1602

SEQ ID NO: 1633 - protein, 650 aa, Mus musculus
MSEASSEDLMPSPEAPDGEEESAKKKEKKSKGLANMFSVFTKGKKKKKDQPRLSDLEVQPKPRPELDGPLPTVEELKEALEHGRLEVAWQVLALERQLEAAAAAGGMSNEELVWRQSKVEALYVLLCDQVLGVLRRPLEAAPERLSQALAVVSQEELEDRRASGGPLAAALEATRPRRWLQRWRGVVAEVAAERLDAQPATAPEGRSEAESRFLHMGRTMKEDLEVVVERLKPLFPDEFNVVRTYAESYHYHFASHLCALAQFELCERDTYLLLLWVQNLYPNDILNSPKLAQELQGVGLGSLLPPKQIRLLEAMFLSNEVTSVKQLMARALELESQRWTQDVAPQSLDGHCHSELAIDILQIISQGQTKAENITSDVGMQIKQLLLVELAALLRSYQRAFDEFLEKSKLLRNYRVNIMANINNCLFFWTSVEQKWQISHDSLNRLLEPLKDLKAHGFDTLLQSLFLDLKPLFKKFTQTRWANPVETLEEIITTVSSSLPEFSELQDCFREELMETVHLHLVKEYIIRLCKRRLVLKTAEQQQQLARHILANADAIQGFCTENGSTATWLHRALPMIAEIIRLQDSSAIKIEVATYATWYPDFSKGHLNAILAIKGNLPSSEVRSIRNILDINTGVQEPPRPLFSLIKVT

SEQ ID NO: 1634 - protein, 324 aa, Mus musculus; identical to SEQ ID NO: 1448

SEQ ID NO: 1635 - protein, 116 aa, Mus musculus
MTHLLTVFLVALMGLPVAQALECHVCAYNGDNCFKPMRCPAMATYCMTTRTYFTPYRMKVRKSCVPSCFETVYDGYSKHASATSCCQYYLCNGAGFATPVTLALVPALLATFWSLL

SEQ ID NO: 1636 - protein, 135 aa, Mus musculus; identical to SEQ ID NO: 1516

SEQ ID NO: 1637 - protein, 1020 aa, Mus musculus
MKMPLLVSHLLLISLTSCLGDFTWHRRYGHGVSEEDKGFGPIFEEQPINTIYPEESLEGKVSLNCRARASPFPVYKWRMNNGDVDLTNDRYSMVGGNLVINNPDKQKDAGVYYCLASNNYGMVRSTEATLSFGYLDPFPPEERPEVKVKEGKGMVLLCDPPYHFPDDLSYRWLLNEFPVFITMDKRRFVSQTNGNLYIANVESSDRGNYSCFVSSPSITKSVFSKFIPLIPIPERTTKPYPADIVVQFKDIYTMMGQNVTLECFALGNPVPDIRWRKVLEPMPSTAEISTSGAVLKIFNIQLEDEGLYECEAENIRGKDKHQARIYVQAFPEWVEHINDTEVDIGSDLYWPCIATGKPIPTIRWLKNGYSYHKGELRLYDVTFENAGMYQCIAENAYGSIYANAELKILALAPTFEMNPMKKKILAAKGGRVIIECKPKAAPKPKFSWSKGTEWLVNSSRILIWEDGSLEINNITRNDGGIYTCFAENNRGKANSTGTLVITNPTRIILAPINADITVGENATMQCAASFDPALDLTFVWSFNGYVIDFNKEITHIHYQRNFMLDANGELLIRNAQLKHAGRYTCTAQTIVDNSSASADLVVRGPPGPPGGLRIEDIRATSVALTWSRGSDNHSPISKYTIQTKTILSDDWKDAKTDPPIIEGNMESAKAVDLIPWMEYEFRVVATNTLGTGEPSIPSNRIKTDGAAPNVAPSDVGGGGGTNRELTITWAPLSREYHYGNNFGYIVAFKPFDGEEWKKVTVTNPDTGRYVHKDETMTPSTAFQVKVKAFNNKGDGPYSLVAVINSAQDAPSEAPTEVGVKVLSSSEISVHWKHVLEKIVESYQIRYWAGHDKEAAAHRVQVTSQEYSARLENLLPDTQYFIEVGACNSAGCGPSSDVIETFTRKAPPSQPPRIISSVRSGSRYIITWDHVVALSNESTVTGYKILYRPDGQHDGKLFSTHKHSIEVPIPRDGEYVVEVRAHSDGGDGVVSQVKISGVSTLSSSLLSLLLPSLGFLVYSEF

SEQ ID NO: 1638 - protein, 662 aa, Mus musculus
MASPRAVQLSLRKPTHAVCVVGVETLVNVYSDVPKGAKTFGVSGSSEVKIYMVYDPSRVAEPAGWAHWPLDANVDVVVVADTVSKDLYDFKVKVSYFESQEAAALAHSVLYLTAVDVSLDVDTGRTGKVKKGSGDKKTWRWGPGGSGAILLVNCDRDIHGSREDLHANHLKSLEDLQDMSPMVLSCGGPDELFESHKLVLKASLSDSRRLKVFCARGGTSLSNYKQVLGPRHSSYEVERHSGERAIQFYVEGLAFPDASFSGLLSLSVSLVDTRPLSEVSVFTDSVTFRVAPWIMTPNTQPPLELYVCSVTDIHGRNDKFLEDMSHLATKANCKLVVCPRAENRNDRWIQDELEFGYIDAPHKSFPVVFDSPRNRGLRDFALKRILGPDFGYVTREIEFAGASGLDSFGNLDVSPPVRVGNTDYPLGRILIGGSFPKPSGRRMARVVRDFLQAQQVQSPVELYSDWLSVGHVDEFLSFVPTSDQKGFRLLLASPSACLQLFQEKKEEGYGEAEQFDGLKHKAKRSINDILADKHLRRDSAHVQKCIDWNREVLKRELGLSESDIVDIPQLFFLKGAYAEAFFPDMVNMVVLGKYLGIPKPFGPLINGRCCLEEKVRSLLEPLGLRCVFIDDFLFYHQLLGEIHCGTNVRRKPFTFKWWNSVP

SEQ ID NO: 1639 - protein, 664 aa, Mus musculus
MSLQRIVRVSLEHPTSAVCVAGVETIVDIYGSVPEGTDMFEVYGTPGVDIYLSPSMERNRERADTRRWCFNKGLEIIVVMNSPSNDLNDSHVQIAYHSSREHLPLAYAVLYLTCVDITLDCDMNCADRQDRSFVDKRQWVWGPDGYGAILLVNCDRDNVDSNAQDNCDQYVRCLQDLEDMSVMVLRTQGPEALFEDHRLILHTSSCDAERARVFHVCGPEDSCEAYKCVLGPDRMSYEVPRLKGYEERFFVEGLSFPDAGFPGLISFHVTLLDDSNEDFSETPIFTDTAVFRVAPWIMTPSTLPPLEVYVCRVRNNTCFVEAVEELARKAGCKLTICPQAENRNDRWIQDEMELGYVQAPHKTLPVVFDSPRNGELQGFPYKRILGLDFGYVTREPKDSSVSGLDSFGNLEVSPPVVANGKEYPLGRILIGGNLPGSRGRRVTQVVRNFLHAQKVQPLVELFVDWLAVGHVDEFLSFVPAPDGKGFRLLLASPGACFRLFQEKQKWGHGRSLLFEGVIGDRRVQTVSINQILNNQSLINFNKFAQSCIDWNREVLKRELGLAEGDIIDIPQLFKTEKRKAVAFFPDLVNMLVLGKHLGIPKPFGPIINGRCCLEEKVRSLLEPLGLHCTFIDDFTPYHMLHGEVHCGTNVRREPFAFKWWHMVP

SEQ ID NO: 1640 - protein, 265 aa, Mus musculus; identical to SEQ ID NO: 1598

SEQ ID NO: 1641 - protein, 535 aa, Mus musculus; identical to SEQ ID NO: 1524

SEQ ID NO: 1642 - DNA, 22 bp, Artificial
  an artificially synthesized primer sequence
ccttggctgtgatattgtgtgc

SEQ ID NO: 1643 - DNA, 22 bp, Artificial
  an artificially synthesized TaqMan probe sequence
  misc_binding (1)..(1): Label FAM(6-carboxy-fluorescein)
  misc_binding (22)..(22): Label TAMRA(6-carboxy-N,N,N',N'-tetramethylrhodamine)
acgctgtctttgcataggccct

SEQ ID NO: 1644 - DNA, 24 bp, Artificial
  an artificially synthesized primer sequence
ctcaatatctgccactttcactgc

SEQ ID NO: 1645 - DNA, 22 bp, Artificial
  an artificially synthesized primer sequence
tgtctcacacagcagtaccctg

SEQ ID NO: 1646 - DNA, 30 bp, Artificial
  an artificially synthesized TaqMan probe sequence
  misc_binding (1)..(1): Label FAM(6-carboxy-fluorescein)
  misc_binding (30)..(30): Label TAMRA(6-carboxy-N,N,N',N'-tetramethylrhodamine)
tgctgtgcaccttacattcctagagagcag

SEQ ID NO: 1647 - DNA, 22 bp, Artificial
  an artificially synthesized primer sequence
gtgccaagcattctacagcatt

SEQ ID NO: 1648 - DNA, 21 bp, Artificial
  an artificially synthesized primer sequence
tgactgaggacgcaggtgatt

SEQ ID NO: 1649 - DNA, 25 bp, Artificial
  an artificially synthesized TaqMan probe sequence
  misc_binding (1)..(1): Label FAM(6-carboxy-fluorescein)
  misc_binding (25)..(25): Label TAMRA(6-carboxy-N,N,N',N'-tetramethylrhodamine)
ccaggtccttcacggtcaaggatga

SEQ ID NO: 1650 - DNA, 21 bp, Artificial
  an artificially synthesized primer sequence
gggctccgattactggaaaca

SEQ ID NO: 1651 - DNA, 21 bp, Artificial
  an artificially synthesized primer sequence
ctgcagacctggtgtcgagag

SEQ ID NO: 1652 - DNA, 23 bp, Artificial
  an artificially synthesized TaqMan probe sequence
  misc_binding (1)..(1): Label FAM(6-carboxy-fluorescein)
  misc_binding (23)..(23): Label TAMRA(6-carboxy-N,N,N',N'-tetramethylrhodamine)
tcactgaaatcgggctgcaaggg

SEQ ID NO: 1653 - DNA, 20 bp, Artificial
  an artificially synthesized primer sequence
acaggaaaccctcggtcctg

SEQ ID NO: 1654 - DNA, 19 bp, Artificial
  an artificially synthesized primer sequence
tgctcctccggtcactgtg

SEQ ID NO: 1655 - DNA, 23 bp, Artificial
  an artificially synthesized TaqMan probe sequence
  misc_binding (1)..(1): Label FAM(6-carboxy-fluorescein)
  misc_binding (23)..(23): Label TAMRA(6-carboxy-N,N,N',N'-tetramethylrhodamine)
cagcccacccttcccagttcctg

SEQ ID NO: 1656 - DNA, 20 bp, Artificial
  an artificially synthesized primer sequence
ttgatgacctgctttggtgc

SEQ ID NO: 1657 - DNA, 23 bp, Artificial
  an artificially synthesized primer sequence
tgtccggtctaagaccaaggttc

SEQ ID NO: 1658 - DNA, 26 bp, Artificial
  an artificially synthesized TaqMan probe sequence
  misc_binding (1)..(1): Label FAM(6-carboxy-fluorescein)
  misc_binding (26)..(26): Label TAMRA(6-carboxy-N,N,N',N'-tetramethylrhodamine)
tgtgcaggaccaggttcttttgctgg

SEQ ID NO: 1659 - DNA, 21 bp, Artificial
  an artificially synthesized primer sequence
ggcttctccgtggctttaaga

SEQ ID NO: 1660 - DNA, 23 bp, Artificial
  an artificially synthesized primer sequence
tgaggagatccacgacttacacc

SEQ ID NO: 1661 - DNA, 28 bp, Artificial
  an artificially synthesized TaqMan probe sequence
  misc_binding (1)..(1): Label FAM(6-carboxy-fluorescein)
  misc_binding (28)..(28): Label TAMRA(6-carboxy-N,N,N',N'-tetramethylrhodamine)
cgataagttccgtttcaccccacctttg

SEQ ID NO: 1662 - DNA, 24 bp, Artificial
  an artificially synthesized primer sequence
tcaggtagttggagttgaagccat

SEQ ID NO: 1663 - DNA, 19 bp, Artificial
  an artificially synthesized primer sequence
cgtggaccgctacctctcc

SEQ ID NO: 1664 - DNA, 26 bp, Artificial
  an artificially synthesized TaqMan probe sequence
  misc_binding (1)..(1): Label FAM(6-carboxy-fluorescein)
  misc_binding (26)..(26): Label TAMRA(6-carboxy-N,N,N',N'-tetramethylrhodamine)
tcacctacttcaccaacacccccagc

SEQ ID NO: 1665 - DNA, 21 bp, Artificial
  an artificially synthesized primer sequence
ggcgtaccatcttcttcctgc

SEQ ID NO: 1666 - DNA, 23 bp, Artificial
  an artificially synthesized primer sequence
cagcgctacaaagttgactacga

SEQ ID NO: 1667 - DNA, 27 bp, Artificial
  an artificially synthesized TaqMan probe sequence
  misc_binding (1)..(1): Label FAM(6-carboxy-fluorescein)
  misc_binding (27)..(27): Label TAMRA(6-carboxy-N,N,N',N'-tetramethylrhodamine)
ccatattctgtctcccgcttggactcg

SEQ ID NO: 1668 - DNA, 23 bp, Artificial
  an artificially synthesized primer sequence
caggtgattcagtgtgtcttcca

SEQ ID NO: 1669 - DNA, 17 bp, Artificial
  an artificially synthesized primer sequence
ccaagcaggcactgccc

SEQ ID NO: 1670 - DNA, 25 bp, Artificial
  an artificially synthesized TaqMan probe sequence
  misc_binding (1)..(1): Label FAM(6-carboxy-fluorescein)
  misc_binding (25)..(25): Label TAMRA(6-carboxy-N,N,N',N'-tetramethylrhodamine)
ccacaggatgtgaaccgcagagacc

SEQ ID NO: 1671 - DNA, 19 bp, Artificial
  an artificially synthesized primer sequence
cgtggtagaggtgcctgga

SEQ ID NO: 1672 - DNA, 23 bp, Artificial
  an artificially synthesized primer sequence
agctggagaaagccttgaactct

SEQ ID NO: 1673 - DNA, 26 bp, Artificial
  an artificially synthesized TaqMan probe sequence
  misc_binding (1)..(1): Label FAM(6-carboxy-fluorescein)
  misc_binding (26)..(26): Label TAMRA(6-carboxy-N,N,N',N'-tetramethylrhodamine)
tccatgccgtctacagggatgacctg

SEQ ID NO: 1674 - DNA, 23 bp, Artificial
  an artificially synthesized primer sequence
ctgaggacactcggtctctagca

SEQ ID NO: 1675 - DNA, 24 bp, Artificial
  an artificially synthesized primer sequence
ggtagaggagagcccagtatacca

SEQ ID NO: 1676 - DNA, 24 bp, Artificial
  an artificially synthesized TaqMan probe sequence
  misc_binding (1)..(1): Label FAM(6-carboxy-fluorescein)
  misc_binding (24)..(24): Label TAMRA(6-carboxy-N,N,N',N'-tetramethylrhodamine)
tgctgcaccaaatgtggctccttc

SEQ ID NO: 1677 - DNA, 24 bp, Artificial
  an artificially synthesized primer sequence
ggcttaaatgccactatgtaacca

SEQ ID NO: 1678 - DNA, 23 bp, Artificial
  an artificially synthesized primer sequence
aagaggacatgacggaacagatc

SEQ ID NO: 1679 - DNA, 28 bp, Artificial
  an artificially synthesized TaqMan probe sequence
  misc_binding (1)..(1): Label FAM(6-carboxy-fluorescein)
  misc_binding (28)..(28): Label TAMRA(6-carboxy-N,N,N',N'-tetramethylrhodamine)
aagcactaaaccctgtccgctggaaagt

SEQ ID NO: 1680 - DNA, 25 bp, Artificial
  an artificially synthesized primer sequence
ccacaattctcaccctcaattaaga

SEQ ID NO: 1681 - DNA, 24 bp, Artificial
  an artificially synthesized primer sequence
tgggacaccagagaaataacagac

SEQ ID NO: 1682 - DNA, 26 bp, Artificial
  an artificially synthesized TaqMan probe sequence
  misc_binding (1)..(1): Label FAM(6-carboxy-fluorescein)
  misc_binding (26)..(26): Label TAMRA(6-carboxy-N,N,N',N'-tetramethylrhodamine)
cacgctggaggtttcaggtgcagaac

SEQ ID NO: 1683 - DNA, 20 bp, Artificial
  an artificially synthesized primer sequence
aggccagaacccagtgtcag

SEQ ID NO: 1684 - DNA, 22 bp, Artificial
  an artificially synthesized primer sequence
tggatgctcagctgtcagaatc

SEQ ID NO: 1685 - DNA, 25 bp, Artificial
  an artificially synthesized TaqMan probe sequence
  misc_binding (1)..(1): Label FAM(6-carboxy-fluorescein)
  misc_binding (25)..(25): Label TAMRA(6-carboxy-N,N,N',N'-tetramethylrhodamine)
catctgaaagccggtttgcaagcct

SEQ ID NO: 1686 - DNA, 22 bp, Artificial
  an artificially synthesized primer sequence
tgttacactcctggacctggaa

SEQ ID NO: 1687 - DNA, 20 bp, Artificial
  an artificially synthesized primer sequence
caatgcactgagcccttcag

SEQ ID NO: 1688 - DNA, 22 bp, Artificial
  an artificially synthesized TaqMan probe sequence
  misc_binding (1)..(1): Label FAM(6-carboxy-fluorescein)
  misc_binding (22)..(22): Label TAMRA(6-carboxy-N,N,N',N'-tetramethylrhodamine)
cccacgcaggctgcaaaccttg

SEQ ID NO: 1689 - DNA, 21 bp, Artificial
  an artificially synthesized primer sequence
tccgtcccccaaggtctatag

SEQ ID NO: 1690 - DNA, 20 bp, Artificial
  an artificially synthesized primer sequence
ggcttccttcaatggcatgt

SEQ ID NO: 1691 - DNA, 27 bp, Artificial
  an artificially synthesized TaqMan probe sequence
  misc_binding (1)..(1): Label FAM(6-carboxy-fluorescein)
  misc_binding (27)..(27): Label TAMRA(6-carboxy-N,N,N',N'-tetramethylrhodamine)
cagcattgaccgtctggagtttgacct

SEQ ID NO: 1692 - DNA, 20 bp, Artificial
  an artificially synthesized primer sequence
gtcacccttgatggcaggat

SEQ ID NO: 1693 - DNA, 24 bp, Artificial
  an artificially synthesized primer sequence
ccctactgccactgtgaagtttct

SEQ ID NO: 1694 - DNA, 24 bp, Artificial
  an artificially synthesized TaqMan probe sequence
  misc_binding (1)..(1): Label FAM(6-carboxy-fluorescein)
  misc_binding (24)..(24): Label TAMRA(6-carboxy-N,N,N',N'-tetramethylrhodamine)
cacagctgcctgcatcgcagatct

SEQ ID NO: 1695 - DNA, 24 bp, Artificial
  an artificially synthesized primer sequence
agcagtatccagaggaaaggtgat

SEQ ID NO: 1696 - DNA, 24 bp, Artificial
  an artificially synthesized primer sequence
tggaaaatgaagcctaggagaaat

SEQ ID NO: 1697 - DNA, 26 bp, Artificial
  an artificially synthesized TaqMan probe sequence
  misc_binding (1)..(1): Label FAM(6-carboxy-fluorescein)
  misc_binding (26)..(26): Label TAMRA(6-carboxy-N,N,N',N'-tetramethylrhodamine)
tgctggtctctcccgtgtccttatgc

SEQ ID NO: 1698 - DNA, 23 bp, Artificial
  an artificially synthesized primer sequence
tctgaagggcagtcaaattcatc

SEQ ID NO: 1699 - DNA, 20 bp, Artificial
  an artificially synthesized primer sequence
tggccaccgtctctatgtca

SEQ ID NO: 1700 - DNA, 29 bp, Artificial
  an artificially synthesized TaqMan probe sequence
  misc_binding (1)..(1): Label FAM(6-carboxy-fluorescein)
  misc_binding (29)..(29): Label TAMRA(6-carboxy-N,N,N',N'-tetramethylrhodamine)
ctcggcataaagctccaagtgaatacgcc

SEQ ID NO: 1701 - DNA, 20 bp, Artificial
  an artificially synthesized primer sequence
ccagcctcaacagacttgca

SEQ ID NO: 1702 - DNA, 23 bp, Artificial
  an artificially synthesized primer sequence
cactgttccctcgactgctaact

SEQ ID NO: 1703 - DNA, 27 bp, Artificial
  an artificially synthesized TaqMan probe sequence
  misc_binding (1)..(1): Label FAM(6-carboxy-fluorescein)
  misc_binding (27)..(27): Label TAMRA(6-carboxy-N,N,N',N'-tetramethylrhodamine)
ctacaaggagaacatcgccaaatgcca

SEQ ID NO: 1704 - DNA, 21 bp, Artificial
  an artificially synthesized primer sequence
aagatccgggaggtggaaatt

SEQ ID NO: 1705 - DNA, 19 bp, Artificial
  an artificially synthesized primer sequence
tttctgggtagggcccatc

SEQ ID NO: 1706 - DNA, 30 bp, Artificial
  an artificially synthesized TaqMan probe sequence
  misc_binding (1)..(1): Label FAM(6-carboxy-fluorescein)
  misc_binding (30)..(30): Label TAMRA(6-carboxy-N,N,N',N'-tetramethylrhodamine)
ctggctgccatcctttacttctacctgctc

SEQ ID NO: 1707 - DNA, 19 bp, Artificial
  an artificially synthesized primer sequence
atggccacacgctcactca

SEQ ID NO: 1708 - DNA, 21 bp, Artificial
  an artificially synthesized primer sequence
tttgcctcctgaacttccacc

SEQ ID NO: 1709 - DNA, 26 bp, Artificial
  an artificially synthesized TaqMan probe sequence
  misc_binding (1)..(1): Label FAM(6-carboxy-fluorescein)
  misc_binding (26)..(26): Label TAMRA(6-carboxy-N,N,N',N'-tetramethylrhodamine)
cttgttctcggagatgctggctgcat

SEQ ID NO: 1710 - DNA, 26 bp, Artificial
  an artificially synthesized primer sequence
cctactgacactgcaatagcataagc

SEQ ID NO: 1711 - DNA, 19 bp, Artificial
  an artificially synthesized primer sequence
attgatgaacggaaccccc

SEQ ID NO: 1712 - DNA, 27 bp, Artificial
  an artificially synthesized TaqMan probe sequence
  misc_binding (1)..(1): Label FAM(6-carboxy-fluorescein)
  misc_binding (27)..(27): Label TAMRA(6-carboxy-N,N,N',N'-tetramethylrhodamine)
caccccatggtccttgatctctttgga

SEQ ID NO: 1713 - DNA, 21 bp, Artificial
  an artificially synthesized primer sequence
tgctgagctgcttgttaagcc

SEQ ID NO: 1714 - DNA, 21 bp, Artificial
  an artificially synthesized primer sequence
tgctcagatgacggaatttgg

SEQ ID NO: 1715 - DNA, 30 bp, Artificial
  an artificially synthesized TaqMan probe sequence
  misc_binding (1)..(1): Label FAM(6-carboxy-fluorescein)
  misc_binding (30)..(30): Label TAMRA(6-carboxy-N,N,N',N'-tetramethylrhodamine)
tgagtggagtgataaacaatgctgggaagg

SEQ ID NO: 1716 - DNA, 23 bp, Artificial
  an artificially synthesized primer sequence
tggtagccagaaacgtagcaaag

SEQ ID NO: 1717 - DNA, 22 bp, Artificial
  an artificially synthesized primer sequence
tggcagagatcgagaaagcttc

SEQ ID NO: 1718 - DNA, 26 bp, Artificial
  an artificially synthesized TaqMan probe sequence
  misc_binding (1)..(1): Label FAM(6-carboxy-fluorescein)
  misc_binding (26)..(26): Label TAMRA(6-carboxy-N,N,N',N'-tetramethylrhodamine)
acccgagtaacggctgcgacaaagtt

SEQ ID NO: 1719 - DNA, 20 bp, Artificial
  an artificially synthesized primer sequence
tccaggcacctttgtcgttt

SEQ ID NO: 1720 - DNA, 23 bp, Artificial
  an artificially synthesized primer sequence
cctctgaagatgtgcaggagttc

SEQ ID NO: 1721 - DNA, 24 bp, Artificial
  an artificially synthesized TaqMan probe sequence
  misc_binding (1)..(1): Label FAM(6-carboxy-fluorescein)
  misc_binding (24)..(24): Label TAMRA(6-carboxy-N,N,N',N'-tetramethylrhodamine)
cacaaagccaagtgaaggccagcc

SEQ ID NO: 1722 - DNA, 23 bp, Artificial
  an artificially synthesized primer sequence
cagaatggagtagcgtcacttga

SEQ ID NO: 1723 - DNA, 21 bp, Artificial
  an artificially synthesized primer sequence
tcctaggtggccagagttgtg

SEQ ID NO: 1724 - DNA, 27 bp, Artificial
  an artificially synthesized TaqMan probe sequence
  misc_binding (1)..(1): Label FAM(6-carboxy-fluorescein)
  misc_binding (27)..(27): Label TAMRA(6-carboxy-N,N,N',N'-tetramethylrhodamine)
cccaagacctcactgatcacaacagca

SEQ ID NO: 1725 - DNA, 23 bp, Artificial
  an artificially synthesized primer sequence
cacccggagtaacaccattatca

SEQ ID NO: 1726 - DNA, 17 bp, Artificial
  an artificially synthesized primer sequence
taccccaccgccgattt

SEQ ID NO: 1727 - DNA, 22 bp, Artificial
  an artificially synthesized TaqMan probe sequence
  misc_binding (1)..(1): Label FAM(6-carboxy-fluorescein)
  misc_binding (22)..(22): Label TAMRA(6-carboxy-N,N,N',N'-tetramethylrhodamine)
cacgcccttggatcccccaatg

SEQ ID NO: 1728 - DNA, 17 bp, Artificial
  an artificially synthesized primer sequence
cccagcatttggccagg

SEQ ID NO: 1729 - DNA, 22 bp, Artificial
  an artificially synthesized primer sequence
ggctctccaaccccctattcta

SEQ ID NO: 1730 - DNA, 28 bp, Artificial
  an artificially synthesized TaqMan probe sequence
  misc_binding (1)..(1): Label FAM(6-carboxy-fluorescein)
  misc_binding (28)..(28): Label TAMRA(6-carboxy-N,N,N',N'-tetramethylrhodamine)
agacagtttctaccaaccagcccccaag

SEQ ID NO: 1731 - DNA, 22 bp, Artificial
  an artificially synthesized primer sequence
gcctctttggtttcactatggg

SEQ ID NO: 1732 - DNA, 23 bp, Artificial
  an artificially synthesized primer sequence
tgacaaggaaaccactatccacc

SEQ ID NO: 1733 - DNA, 26 bp, Artificial
  an artificially synthesized TaqMan probe sequence
  misc_binding (1)..(1): Label FAM(6-carboxy-fluorescein)
  misc_binding (26)..(26): Label TAMRA(6-carboxy-N,N,N',N'-tetramethylrhodamine)
cctgaaggtggtgaagcccagtgatg

SEQ ID NO: 1734 - DNA, 20 bp, Artificial
  an artificially synthesized primer sequence
ccagaaacaagggcagctct

SEQ ID NO: 1735 - DNA, 24 bp, Artificial
  an artificially synthesized primer sequence
cctggctgcctacatcttagagaa

SEQ ID NO: 1736 - DNA, 30 bp, Artificial
  an artificially synthesized TaqMan probe sequence
  misc_binding (1)..(1): Label FAM(6-carboxy-fluorescein)
  misc_binding (30)..(30): Label TAMRA(6-carboxy-N,N,N',N'-tetramethylrhodamine)
ctggaccaagtcagaataccgtgaactgga

SEQ ID NO: 1737 - DNA, 24 bp, Artificial
  an artificially synthesized primer sequence
ttagtcagcagatcttccagggag

SEQ ID NO: 1738 - DNA, 20 bp, Artificial
  an artificially synthesized primer sequence
tgggagcatcttcttcctcg

SEQ ID NO: 1739 - DNA, 24 bp, Artificial
  an artificially synthesized TaqMan probe sequence
  misc_binding (1)..(1): Label FAM(6-carboxy-fluorescein)
  misc_binding (24)..(24): Label TAMRA(6-carboxy-N,N,N',N'-tetramethylrhodamine)
tgcatgagcgtggaccgctatctc

SEQ ID NO: 1740 - DNA, 20 bp, Artificial
  an artificially synthesized primer sequence
gccggtgaagtaggtgatgg

SEQ ID NO: 1741 - DNA, 20 bp, Artificial
  an artificially synthesized primer sequence
gcaggcagcctaagcaccta

SEQ ID NO: 1742 - DNA, 24 bp, Artificial
  an artificially synthesized TaqMan probe sequence
  misc_binding (1)..(1): Label FAM(6-carboxy-fluorescein)
  misc_binding (24)..(24): Label TAMRA(6-carboxy-N,N,N',N'-tetramethylrhodamine)
cctcccaacctgctccaggaaaca

SEQ ID NO: 1743 - DNA, 20 bp, Artificial
  an artificially synthesized primer sequence
tgctcctcctcggactcact

SEQ ID NO: 1744 - DNA, 20 bp, Artificial
  an artificially synthesized primer sequence
ggagagcaaaccccaaggag

SEQ ID NO: 1745 - DNA, 23 bp, Artificial
  an artificially synthesized TaqMan probe sequence
  misc_binding (1)..(1): Label FAM(6-carboxy-fluorescein)
  misc_binding (23)..(23): Label TAMRA(6-carboxy-N,N,N',N'-tetramethylrhodamine)
tgcctcccgctctcgtgacacaa

SEQ ID NO: 1746 - DNA, 20 bp, Artificial
  an artificially synthesized primer sequence
tcttctgccggtctctgtgg

SEQ ID NO: 1747 - DNA, 23 bp, Artificial
  an artificially synthesized primer sequence
gagtgtcctcagtttgtgcagaa

SEQ ID NO: 1748 - DNA, 28 bp, Artificial
  an artificially synthesized TaqMan probe sequence
  misc_binding (1)..(1): Label FAM(6-carboxy-fluorescein)
  misc_binding (28)..(28): Label TAMRA(6-carboxy-N,N,N',N'-tetramethylrhodamine)
cacccacttttatcaccatcgcaaggaa

SEQ ID NO: 1749 - DNA, 23 bp, Artificial
  an artificially synthesized primer sequence
cttgtggctgtctttgtgagatg

SEQ ID NO: 1750 - DNA, 21 bp, Artificial
  an artificially synthesized primer sequence
cccaggaggcctgagaataga

SEQ ID NO: 1751 - DNA, 28 bp, Artificial
  an artificially synthesized TaqMan probe sequence
  misc_binding (1)..(1): Label FAM(6-carboxy-fluorescein)
  misc_binding (28)..(28): Label TAMRA(6-carboxy-N,N,N',N'-tetramethylrhodamine)
tggttccgacaatcacagccctatctct

SEQ ID NO: 1752 - DNA, 22 bp, Artificial
  an artificially synthesized primer sequence
gaatcgtcttggtctggatcgt

SEQ ID NO: 1753 - DNA, 21 bp, Artificial
  an artificially synthesized primer sequence
gacagcttcgatgagcaggtt

SEQ ID NO: 1754 - DNA, 25 bp, Artificial
  an artificially synthesized TaqMan probe sequence
  misc_binding (1)..(1): Label FAM(6-carboxy-fluorescein)
  misc_binding (25)..(25): Label TAMRA(6-carboxy-N,N,N',N'-tetramethylrhodamine)
ccttgaccacggccaatcagagcat

SEQ ID NO: 1755 - DNA, 20 bp, Artificial
  an artificially synthesized primer sequence
ctgcaccacctcctcagctt

SEQ ID NO: 1756 - DNA, 18 bp, Artificial
  an artificially synthesized primer sequence
aaggagtccaggcccagc

SEQ ID NO: 1757 - DNA, 30 bp, Artificial
  an artificially synthesized TaqMan probe sequence
  misc_binding (1)..(1): Label FAM(6-carboxy-fluorescein)
  misc_binding (30)..(30): Label TAMRA(6-carboxy-N,N,N',N'-tetramethylrhodamine)
cagatgctcaggacaaacactcagggaact

SEQ ID NO: 1758 - DNA, 19 bp, Artificial
  an artificially synthesized primer sequence
tccatgcagcttccaggag

SEQ ID NO: 1759 - DNA, 22 bp, Artificial
  an artificially synthesized primer sequence
acagcaacaacctgtgcctaca

SEQ ID NO: 1760 - DNA, 27 bp, Artificial
  an artificially synthesized TaqMan probe sequence
  misc_binding (1)..(1): Label FAM(6-carboxy-fluorescein)
  misc_binding (27)..(27): Label TAMRA(6-carboxy-N,N,N',N'-tetramethylrhodamine)
tcaacctgttccctgccaccctaattg

SEQ ID NO: 1761 - DNA, 20 bp, Artificial
  an artificially synthesized primer sequence
tgcaacccagctttcagatg

SEQ ID NO: 1762 - DNA, 23 bp, Artificial
  an artificially synthesized primer sequence
cactctcagtctcacggatttca

SEQ ID NO: 1763 - DNA, 25 bp, Artificial
  an artificially synthesized TaqMan probe sequence
  misc_binding (1)..(1): Label FAM(6-carboxy-fluorescein)
  misc_binding (25)..(25): Label TAMRA(6-carboxy-N,N,N',N'-tetramethylrhodamine)
ccagtgtcgacctgcgtaagcgatc

SEQ ID NO: 1764 - DNA, 23 bp, Artificial
  an artificially synthesized primer sequence
ttcacaggcaccaagctactttc

SEQ ID NO: 1765 - DNA, 21 bp, Artificial
  an artificially synthesized primer sequence
caccctgaccaagatccttga

SEQ ID NO: 1766 - DNA, 27 bp, Artificial
  an artificially synthesized TaqMan probe sequence
  misc_binding (1)..(1): Label FAM(6-carboxy-fluorescein)
  misc_binding (27)..(27): Label TAMRA(6-carboxy-N,N,N',N'-tetramethylrhodamine)
tacacactgctgcccaatgagaatggc

SEQ ID NO: 1767 - DNA, 21 bp, Artificial
  an artificially synthesized primer sequence
acccttgctcacagaccacat

SEQ ID NO: 1768 - DNA, 22 bp, Artificial
  an artificially synthesized primer sequence
gcattggcctctacgactctgt

SEQ ID NO: 1769 - DNA, 26 bp, Artificial
  an artificially synthesized TaqMan probe sequence
  misc_binding (1)..(1): Label FAM(6-carboxy-fluorescein)
  misc_binding (26)..(26): Label TAMRA(6-carboxy-N,N,N',N'-tetramethylrhodamine)
cctgcatgctctgagcccttggtgta

SEQ ID NO: 1770 - DNA, 19 bp, Artificial
  an artificially synthesized primer sequence
gcctggaagcggaccttta

SEQ ID NO: 1771 - DNA, 24 bp, Artificial
  an artificially synthesized primer sequence
agtgacgatgttacaaacccagaa

SEQ ID NO: 1772 - DNA, 27 bp, Artificial
  an artificially synthesized TaqMan probe sequence
  misc_binding (1)..(1): Label FAM(6-carboxy-fluorescein)
  misc_binding (27)..(27): Label TAMRA(6-carboxy-N,N,N',N'-tetramethylrhodamine)
tgctcgtctctcccgagtccttagtcg

SEQ ID NO: 1773 - DNA, 21 bp, Artificial
  an artificially synthesized primer sequence
gaattcctgcgtgtgctgaag

SEQ ID NO: 1774 - DNA, 22 bp, Artificial
  an artificially synthesized primer sequence
cagcttgctcaatggagtcact

SEQ ID NO: 1775 - DNA, 26 bp, Artificial
  an artificially synthesized TaqMan probe sequence
  misc_binding (1)..(1): Label FAM(6-carboxy-fluorescein)
  misc_binding (26)..(26): Label TAMRA(6-carboxy-N,N,N',N'-tetramethylrhodamine)
aggacataccttgccctggatcagct

SEQ ID NO: 1776 - DNA, 20 bp, Artificial
  an artificially synthesized primer sequence
accagggtgacatccaaacc

SEQ ID NO: 1777 - DNA, 20 bp, Artificial
  an artificially synthesized primer sequence
ctccagcacctcttcctcca

SEQ ID NO: 1778 - DNA, 26 bp, Artificial
  an artificially synthesized TaqMan probe sequence
  misc_binding (1)..(1): Label FAM(6-carboxy-fluorescein)
  misc_binding (26)..(26): Label TAMRA(6-carboxy-N,N,N',N'-tetramethylrhodamine)
ccgaaccgtcagcaatgaagaagcaa

SEQ ID NO: 1779 - DNA, 20 bp, Artificial
  an artificially synthesized primer sequence
tgttagcgcccatgatgatg

SEQ ID NO: 1780 - DNA, 19 bp, Artificial
  an artificially synthesized primer sequence
gaacccagcccgatctttc

SEQ ID NO: 1781 - DNA, 23 bp, Artificial
  an artificially synthesized TaqMan probe sequence
  misc_binding (1)..(1): Label FAM(6-carboxy-fluorescein)
  misc_binding (23)..(23): Label TAMRA(6-carboxy-N,N,N',N'-tetramethylrhodamine)
ccctgcggtggtcatgaatcggt

SEQ ID NO: 1782 - DNA, 21 bp, Artificial
  an artificially synthesized primer sequence
cccagaagacccagtgagagg

SEQ ID NO: 1783 - DNA, 20 bp, Artificial
  an artificially synthesized primer sequence
ggttcttgcctcctgtcctg

SEQ ID NO: 1784 - DNA, 26 bp, Artificial
  an artificially synthesized TaqMan probe sequence
  misc_binding (1)..(1): Label FAM(6-carboxy-fluorescein)
  misc_binding (26)..(26): Label TAMRA(6-carboxy-N,N,N',N'-tetramethylrhodamine)
catctgtgggcctgttttcggacatg

SEQ ID NO: 1785 - DNA, 20 bp, Artificial
  an artificially synthesized primer sequence
aatggaaaaggatgcagcca

SEQ ID NO: 1786 - DNA, 21 bp, Artificial
  an artificially synthesized primer sequence
tggtccttattgatgagcgga

SEQ ID NO: 1787 - DNA, 27 bp, Artificial
  an artificially synthesized TaqMan probe sequence
  misc_binding (1)..(1): Label FAM(6-carboxy-fluorescein)
  misc_binding (27)..(27): Label TAMRA(6-carboxy-N,N,N',N'-tetramethylrhodamine)
tgaccacccggtggttctcaatttgtt

SEQ ID NO: 1788 - DNA, 18 bp, Artificial
  an artificially synthesized primer sequence
cgggttgctgctgttgtg

SEQ ID NO: 1789 - DNA, 22 bp, Artificial
  an artificially synthesized primer sequence
acacagggccagactcaaagat

SEQ ID NO: 1790 - DNA, 27 bp, Artificial
  an artificially synthesized TaqMan probe sequence
  misc_binding (1)..(1): Label FAM(6-carboxy-fluorescein)
  misc_binding (27)..(27): Label TAMRA(6-carboxy-N,N,N',N'-tetramethylrhodamine)
aacctgaacccacattgagcctccatg

SEQ ID NO: 1791 - DNA, 24 bp, Artificial
  an artificially synthesized primer sequence
gcacacacttctttgttcagatcc

SEQ ID NO: 1792 - DNA, 20 bp, Artificial
  an artificially synthesized primer sequence
cccagcatcaccctccccga

SEQ ID NO: 1793 - DNA, 20 bp, Artificial
  an artificially synthesized TaqMan probe sequence
  misc_binding (1)..(1): Label FAM(6-carboxy-fluorescein)
  misc_binding (20)..(20): Label TAMRA(6-carboxy-N,N,N',N'-tetramethylrhodamine)
cccagcatcaccctccccga

SEQ ID NO: 1794 - DNA, 19 bp, Artificial
  an artificially synthesized primer sequence
gcgtcaccacgtcgatcag

SEQ ID NO: 1795 - DNA, 22 bp, Artificial
  an artificially synthesized primer sequence
ggacacattaatatcacccgga

SEQ ID NO: 1796 - DNA, 26 bp, Artificial
  an artificially synthesized TaqMan probe sequence
  misc_binding (1)..(1): Label FAM(6-carboxy-fluorescein)
  misc_binding (26)..(26): Label TAMRA(6-carboxy-N,N,N',N'-tetramethylrhodamine)
acagcctcattcatggtttcacgtgc

SEQ ID NO: 1797 - DNA, 22 bp, Artificial
  an artificially synthesized primer sequence
cccgagattaggagttgctgtt

SEQ ID NO: 1798 - DNA, 25 bp, Artificial
  an artificially synthesized primer sequence
ccacaaagcggatttcacacatgcc

SEQ ID NO: 1799 - DNA, 25 bp, Artificial
  an artificially synthesized TaqMan probe sequence
  misc_binding (1)..(1): Label FAM(6-carboxy-fluorescein)
  misc_binding (25)..(25): Label TAMRA(6-carboxy-N,N,N',N'-tetramethylrhodamine)
ccacaaagcggatttcacacatgcc

SEQ ID NO: 1800 - DNA, 24 bp, Artificial
  an artificially synthesized primer sequence
tcctttcgtaagtccgtagcaact

SEQ ID NO: 1801 - DNA, 27 bp, Artificial
  an artificially synthesized primer sequence
tcctgacgctaagagcttcgtgctgaa

SEQ ID NO: 1802 - DNA, 27 bp, Artificial
  an artificially synthesized TaqMan probe sequence
  misc_binding (1)..(1): Label FAM(6-carboxy-fluorescein)
  misc_binding (27)..(27): Label TAMRA(6-carboxy-N,N,N',N'-tetramethylrhodamine)
tcctgacgctaagagcttcgtgctgaa

SEQ ID NO: 1803 - DNA, 19 bp, Artificial
  an artificially synthesized primer sequence
aagcgagggttgaagtgca

SEQ ID NO: 1804 - DNA, 26 bp, Artificial
  an artificially synthesized primer sequence
aggcactgccctgctgtgctactcct

SEQ ID NO: 1805 - DNA, 26 bp, Artificial
  an artificially synthesized TaqMan probe sequence
  misc_binding (1)..(1): Label FAM(6-carboxy-fluorescein)
  misc_binding (26)..(26): Label TAMRA(6-carboxy-N,N,N',N'-tetramethylrhodamine)
aggcactgccctgctgtgctactcct

SEQ ID NO: 1806 - DNA, 18 bp, Artificial
  an artificially synthesized primer sequence
gctcacctgggctttgca

SEQ ID NO: 1807 - DNA, 21 bp, Artificial
  an artificially synthesized primer sequence
acaccaccaaatgcaacgagg

SEQ ID NO: 1808 - DNA, 25 bp, Artificial
  an artificially synthesized TaqMan probe sequence
  misc_binding (1)..(1): Label FAM(6-carboxy-fluorescein)
  misc_binding (25)..(25): Label TAMRA(6-carboxy-N,N,N',N'-tetramethylrhodamine)
ttgaaaatctgccgcagaatggccg

SEQ ID NO: 1809 - DNA, 22 bp, Artificial
  an artificially synthesized primer sequence
tccccttgcagctgtaacactg

SEQ ID NO: 1810 - DNA, 21 bp, Artificial
  an artificially synthesized primer sequence
acctcgaactttgacagcgac

SEQ ID NO: 1811 - DNA, 26 bp, Artificial
  an artificially synthesized TaqMan probe sequence
  misc_binding (1)..(1): Label FAM(6-carboxy-fluorescein)
  misc_binding (26)..(26): Label TAMRA(6-carboxy-N,N,N',N'-tetramethylrhodamine)
tgcccggaccaaggatacagtttgtt

SEQ ID NO: 1812 - DNA, 21 bp, Artificial
  an artificially synthesized primer sequence
gaggaatgatctaagcccagc

SEQ ID NO: 1813 - DNA, 20 bp, Artificial
  an artificially synthesized primer sequence
atgaacggctgttactcacg

SEQ ID NO: 1814 - DNA, 27 bp, Artificial
  an artificially synthesized TaqMan probe sequence
  misc_binding (1)..(1): Label FAM(6-carboxy-fluorescein)
  misc_binding (27)..(27): Label TAMRA(6-carboxy-N,N,N',N'-tetramethylrhodamine)
tggagattctccagcacgtcatcgact

SEQ ID NO: 1815 - DNA, 20 bp, Artificial
  an artificially synthesized primer sequence
gattccgagttcagctccaa

SEQ ID NO: 1816 - DNA, 22 bp, Artificial
  an artificially synthesized primer sequence
gcattgcatcctcatttcgaat

SEQ ID NO: 1817 - DNA, 25 bp, Artificial
  an artificially synthesized TaqMan probe sequence
  misc_binding (1)..(1): Label FAM(6-carboxy-fluorescein)
  misc_binding (25)..(25): Label TAMRA(6-carboxy-N,N,N',N'-tetramethylrhodamine)
tgaggacacatggaaggaccctgcc

SEQ ID NO: 1818 - DNA, 22 bp, Artificial
  an artificially synthesized primer sequence
cctcgcagaacaaactgagctt

SEQ ID NO: 1819 - DNA, 21 bp, Artificial
  an artificially synthesized primer sequence
agaagaacttgggccatttgg

SEQ ID NO: 1820 - DNA, 27 bp, Artificial
  an artificially synthesized TaqMan probe sequence
  misc_binding (1)..(1): Label FAM(6-carboxy-fluorescein)
  misc_binding (27)..(27): Label TAMRA(6-carboxy-N,N,N',N'-tetramethylrhodamine)
ttctgggcttcccttccaaccaatttg

SEQ ID NO: 1821 - DNA, 19 bp, Artificial
  an artificially synthesized primer sequence
tctcgcctggctcctgttt

SEQ ID NO: 1822 - DNA, 21 bp, Artificial
  an artificially synthesized primer sequence
gggatggtgcccctagactag

SEQ ID NO: 1823 - DNA, 26 bp, Artificial
  an artificially synthesized TaqMan probe sequence
  misc_binding (1)..(1): Label FAM(6-carboxy-fluorescein)
  misc_binding (26)..(26): Label TAMRA(6-carboxy-N,N,N',N'-tetramethylrhodamine)
ctgtcgtctggtgccacttccttcaa

SEQ ID NO: 1824 - DNA, 21 bp, Artificial
  an artificially synthesized primer sequence
gggttttgccagaacagcatt

SEQ ID NO: 1825 - DNA, 22 bp, Artificial
  an artificially synthesized primer sequence
acagcaacaacctgtgcctaca

SEQ ID NO: 1826 - DNA, 24 bp, Artificial
  an artificially synthesized TaqMan probe sequence
  misc_binding (1)..(1): Label FAM(6-carboxy-fluorescein)
  misc_binding (24)..(24): Label TAMRA(6-carboxy-N,N,N',N'-tetramethylrhodamine)
cccatggagacgccaacaccattg

SEQ ID NO: 1827 - DNA, 21 bp, Artificial
  an artificially synthesized primer sequence
cccatcttccttggtgttaca

SEQ ID NO: 1828 - DNA, 22 bp, Artificial
  an artificially synthesized primer sequence
catcccatctcagcctttacca

SEQ ID NO: 1829 - DNA, 26 bp, Artificial
  an artificially synthesized TaqMan probe sequence
  misc_binding (1)..(1): Label FAM(6-carboxy-fluorescein)
  misc_binding (26)..(26): Label TAMRA(6-carboxy-N,N,N',N'-tetramethylrhodamine)
cctactctccagggcctgagccagtg

SEQ ID NO: 1830 - DNA, 22 bp, Artificial
  an artificially synthesized primer sequence
gccctaccaagttttgctcaga

SEQ ID NO: 1831 - DNA, 19 bp, Artificial
  an artificially synthesized primer sequence
caatggtggcccagttctg

SEQ ID NO: 1832 - DNA, 27 bp, Artificial
  an artificially synthesized TaqMan probe sequence
  misc_binding (1)..(1): Label FAM(6-carboxy-fluorescein)
  misc_binding (27)..(27): Label TAMRA(6-carboxy-N,N,N',N'-tetramethylrhodamine)
agctttccaccgaatggcttccagtgt

SEQ ID NO: 1833 - DNA, 21 bp, Artificial
  an artificially synthesized primer sequence
gggtattgttcccctcacagc

SEQ ID NO: 1834 - DNA, 21 bp, Artificial
  an artificially synthesized primer sequence
ccatgcactgggcttagatca

SEQ ID NO: 1835 - DNA, 20 bp, Artificial
  an artificially synthesized TaqMan probe sequence
  misc_binding (1)..(1): Label FAM(6-carboxy-fluorescein)
  misc_binding (20)..(20): Label TAMRA(6-carboxy-N,N,N',N'-tetramethylrhodamine)
agcgtgccggaagcgctcat

SEQ ID NO: 1836 - DNA, 21 bp, Artificial
  an artificially synthesized primer sequence
tcgaggtagctatacagcggg

SEQ ID NO: 1837 - DNA, 21 bp, Artificial
  an artificially synthesized primer sequence
cgacatgaacggctgctactc

SEQ ID NO: 1838 - DNA, 21 bp, Artificial
  an artificially synthesized TaqMan probe sequence
  misc_binding (1)..(1): Label FAM(6-carboxy-fluorescein)
  misc_binding (21)..(21): Label TAMRA(6-carboxy-N,N,N',N'-tetramethylrhodamine)
cgcctcaaggagctggtgccc

SEQ ID NO: 1839 - DNA, 21 bp, Artificial
  an artificially synthesized primer sequence
cttgctcactttgcggttctg

SEQ ID NO: 1840 - DNA, 21 bp, Artificial
  an artificially synthesized primer sequence
accctgagctcttcgaaatcc

SEQ ID NO: 1841 - DNA, 21 bp, Artificial
  an artificially synthesized TaqMan probe sequence
  misc_binding (1)..(1): Label FAM(6-carboxy-fluorescein)
  misc_binding (21)..(21): Label TAMRA(6-carboxy-N,N,N',N'-tetramethylrhodamine)
ttagctccagttcccgaaacc

SEQ ID NO: 1842 - DNA, 21 bp, Artificial
  an artificially synthesized primer sequence
ttagctccagttcccgaaacc

SEQ ID NO: 1843 - DNA, 20 bp, Artificial
  an artificially synthesized primer sequence
gggacctgacggtgaagatg

SEQ ID NO: 1844 - DNA, 25 bp, Artificial
  an artificially synthesized TaqMan probe sequence
  misc_binding (1)..(1): Label FAM(6-carboxy-fluorescein)
  misc_binding (25)..(25): Label TAMRA(6-carboxy-N,N,N',N'-tetramethylrhodamine)
ctgacaccgacatggagctgctcag

SEQ ID NO: 1845 - DNA, 21 bp, Artificial
  an artificially synthesized primer sequence
gccaatcttctgggtgatctg

SEQ ID NO: 1846 - DNA, 22 bp, Artificial
  an artificially synthesized primer sequence
acgtggtcaacatctggctttc

SEQ ID NO: 1847 - DNA, 25 bp, Artificial
  an artificially synthesized TaqMan probe sequence
  misc_binding (1)..(1): Label FAM(6-carboxy-fluorescein)
  misc_binding (25)..(25): Label TAMRA(6-carboxy-N,N,N',N'-tetramethylrhodamine)
tccggctacaacttcccttggtcca

SEQ ID NO: 1848 - DNA, 23 bp, Artificial
  an artificially synthesized primer sequence
ggagcgaagttgcagttaaagtg

SEQ ID NO: 1849 - DNA, 16 bp, Artificial
  an artificially synthesized primer sequence
agccacggtctctcag

SEQ ID NO: 1850 - DNA, 30 bp, Artificial
  an artificially synthesized TaqMan probe sequence
  misc_binding (1)..(1): Label FAM(6-carboxy-fluorescein)
  misc_binding (30)..(30): Label TAMRA(6-carboxy-N,N,N',N'-tetramethylrhodamine)
aaggcctttgtggaggtcactgaggaggga

SEQ ID NO: 1851 - DNA, 16 bp, Artificial
  an artificially synthesized primer sequence
gcagctgcagcttcca

SEQ ID NO: 1852 - DNA, 23 bp, Artificial
  an artificially synthesized primer sequence
atggtcctggtgaatgctgtcta

SEQ ID NO: 1853 - DNA, 25 bp, Artificial
  an artificially synthesized TaqMan probe sequence
  misc_binding (1)..(1): Label FAM(6-carboxy-fluorescein)
  misc_binding (25)..(25): Label TAMRA(6-carboxy-N,N,N',N'-tetramethylrhodamine)
tgtaaactcggctcagcgcacacct

SEQ ID NO: 1854 - DNA, 24 bp, Artificial
  an artificially synthesized primer sequence
gcttttcacgcaagtacatcatct

SEQ ID NO: 1855 - DNA, 19 bp, Artificial
  an artificially synthesized primer sequence
tagcattggccacgagcat

SEQ ID NO: 1856 - DNA, 26 bp, Artificial
  an artificially synthesized TaqMan probe sequence
  misc_binding (1)..(1): Label FAM(6-carboxy-fluorescein)
  misc_binding (26)..(26): Label TAMRA(6-carboxy-N,N,N',N'-tetramethylrhodamine)
tgagcccagacattccaaaatcgaca

SEQ ID NO: 1857 - DNA, 26 bp, Artificial
  an artificially synthesized primer sequence
gatcaccactggctcatatagcttct

SEQ ID NO: 1858 - DNA, 21 bp, Artificial
  an artificially synthesized primer sequence
actttgccaaccgtgagatca

SEQ ID NO: 1859 - DNA, 25 bp, Artificial
  an artificially synthesized TaqMan probe sequence
  misc_binding (1)..(1): Label FAM(6-carboxy-fluorescein)
  misc_binding (25)..(25): Label TAMRA(6-carboxy-N,N,N',N'-tetramethylrhodamine)
tcctggtgcagtctctcctgggcta

SEQ ID NO: 1860 - DNA, 18 bp, Artificial
  an artificially synthesized primer sequence
atccagcaagcgcacgat

SEQ ID NO: 1861 - DNA, 23 bp, Artificial
  an artificially synthesized primer sequence
gaccccagaattcaaggaacttt

SEQ ID NO: 1862 - DNA, 25 bp, Artificial
  an artificially synthesized TaqMan probe sequence
  misc_binding (1)..(1): Label FAM(6-carboxy-fluorescein)
  misc_binding (25)..(25): Label TAMRA(6-carboxy-N,N,N',N'-tetramethylrhodamine)
caagcctggccacatttgcagatga

SEQ ID NO: 1863 - DNA, 21 bp, Artificial
  an artificially synthesized primer sequence
gcctttgtgcaccatcattgt

SEQ ID NO: 1864 - DNA, 20 bp, Artificial
  an artificially synthesized primer sequence
aaaattggctggcagagcaa

SEQ ID NO: 1865 - DNA, 26 bp, Artificial
  an artificially synthesized TaqMan probe sequence
  misc_binding (1)..(1): Label FAM(6-carboxy-fluorescein)
  misc_binding (26)..(26): Label TAMRA(6-carboxy-N,N,N',N'-tetramethylrhodamine)
ctgcacagctcagcacaacattccaa

SEQ ID NO: 1866 - DNA, 20 bp, Artificial
  an artificially synthesized primer sequence
cgtgctggagctcactgaga

SEQ ID NO: 1867 - DNA, 20 bp, Artificial
  an artificially synthesized primer sequence
agaggagcccagagccttct

SEQ ID NO: 1868 - DNA, 25 bp, Artificial
  an artificially synthesized TaqMan probe sequence
  misc_binding (1)..(1): Label FAM(6-carboxy-fluorescein)
  misc_binding (25)..(25): Label TAMRA(6-carboxy-N,N,N',N'-tetramethylrhodamine)
tcatctgtctcccggcctgatacca

SEQ ID NO: 1869 - DNA, 22 bp, Artificial
  an artificially synthesized primer sequence
cccacgatgaaatcaacaacct

SEQ ID NO: 1870 - DNA, 22 bp, Artificial
  an artificially synthesized primer sequence
ccagtcggtccagctctttatt

SEQ ID NO: 1871 - DNA, 24 bp, Artificial
  an artificially synthesized TaqMan probe sequence
  misc_binding (1)..(1): Label FAM(6-carboxy-fluorescein)
  misc_binding (24)..(24): Label TAMRA(6-carboxy-N,N,N',N'-tetramethylrhodamine)
tcaacctggccgtgctttccactt

SEQ ID NO: 1872 - DNA, 24 bp, Artificial
  an artificially synthesized primer sequence
tcaacctggccgtgctttccactt

SEQ ID NO: 1873 - DNA, 25 bp, Artificial
  an artificially synthesized primer sequence
cctgaacaacggattgagctatatc

SEQ ID NO: 1874 - DNA, 25 bp, Artificial
  an artificially synthesized TaqMan probe sequence
  misc_binding (1)..(1): Label FAM(6-carboxy-fluorescein)
  misc_binding (25)..(25): Label TAMRA(6-carboxy-N,N,N',N'-tetramethylrhodamine)
cccagcgctacatcgacagcaaagt

SEQ ID NO: 1875 - DNA, 24 bp, Artificial
  an artificially synthesized primer sequence
aacagcatcagttacatcgaagga

SEQ ID NO: 1876 - DNA, 24 bp, Artificial
  an artificially synthesized primer sequence
ccaagtagaactggtggactttga

SEQ ID NO: 1877 - DNA, 23 bp, Artificial
  an artificially synthesized TaqMan probe sequence
  misc_binding (1)..(1): Label FAM(6-carboxy-fluorescein)
  misc_binding (23)..(23): Label TAMRA(6-carboxy-N,N,N',N'-tetramethylrhodamine)
ccaaatcaggaaagacggcgcca

SEQ ID NO: 1878 - DNA, 24 bp, Artificial
  an artificially synthesized primer sequence
catcctcatatgcttctccattgt

SEQ ID NO: 1879 - DNA, 22 bp, Artificial
  an artificially synthesized primer sequence
acgcagtcctgaggtttaatgg

SEQ ID NO: 1880 - DNA, 28 bp, Artificial
  an artificially synthesized TaqMan probe sequence
  misc_binding (1)..(1): Label FAM(6-carboxy-fluorescein)
  misc_binding (28)..(28): Label TAMRA(6-carboxy-N,N,N',N'-tetramethylrhodamine)
cacccacagccaacttccaacaagatgt

SEQ ID NO: 1881 - DNA, 22 bp, Artificial
  an artificially synthesized primer sequence
gcacaaaaactaccattcgcct

SEQ ID NO: 1882 - DNA, 22 bp, Artificial
  an artificially synthesized primer sequence
tgtgcatagccaagaccttctc

SEQ ID NO: 1883 - DNA, 27 bp, Artificial
  an artificially synthesized TaqMan probe sequence
  misc_binding (1)..(1): Label FAM(6-carboxy-fluorescein)
  misc_binding (27)..(27): Label TAMRA(6-carboxy-N,N,N',N'-tetramethylrhodamine)
ccaataccagccagattcccgaaggta

SEQ ID NO: 1884 - DNA, 21 bp, Artificial
  an artificially synthesized primer sequence
ctggcatcttctgcaggtgtt

SEQ ID NO: 1885 - DNA, 24 bp, Artificial
  an artificially synthesized primer sequence
cagtttgtcctcctcaatctggtt

SEQ ID NO: 1886 - DNA, 28 bp, Artificial
  an artificially synthesized TaqMan probe sequence
  misc_binding (1)..(1): Label FAM(6-carboxy-fluorescein)
  misc_binding (28)..(28): Label TAMRA(6-carboxy-N,N,N',N'-tetramethylrhodamine)
tgtccccaggattatgtttgttgaccca

SEQ ID NO: 1887 - DNA, 25 bp, Artificial
  an artificially synthesized primer sequence
ttccagtgatatcggctctaactgt

SEQ ID NO: 1888 - DNA, 27 bp, Artificial
  an artificially synthesized primer sequence
acctgtctataaggagtcctgcttatc

SEQ ID NO: 1889 - DNA, 26 bp, Artificial
  an artificially synthesized TaqMan probe sequence
  misc_binding (1)..(1): Label FAM(6-carboxy-fluorescein)
  misc_binding (26)..(26): Label TAMRA(6-carboxy-N,N,N',N'-tetramethylrhodamine)
caatgaatgttctcctgggcagcgtt

SEQ ID NO: 1890 - DNA, 22 bp, Artificial
  an artificially synthesized primer sequence
aagtcacgaaggtggcaaagat

SEQ ID NO: 1891 - DNA, 20 bp, Artificial
  an artificially synthesized primer sequence
ctgctcgaaggctacggaat

SEQ ID NO: 1892 - DNA, 27 bp, Artificial
  an artificially synthesized TaqMan probe sequence
  misc_binding (1)..(1): Label FAM(6-carboxy-fluorescein)
  misc_binding (27)..(27): Label TAMRA(6-carboxy-N,N,N',N'-tetramethylrhodamine)
tctgcctttaattgcctctgcttcctg

SEQ ID NO: 1893 - DNA, 20 bp, Artificial
  an artificially synthesized primer sequence
tgcgtagttgaagccttcca

SEQ ID NO: 1894 - DNA, 20 bp, Artificial
  an artificially synthesized primer sequence
ccgtgccagcaactttcatt

SEQ ID NO: 1895 - DNA, 28 bp, Artificial
  an artificially synthesized TaqMan probe sequence
  misc_binding (1)..(1): Label FAM(6-carboxy-fluorescein)
  misc_binding (28)..(28): Label TAMRA(6-carboxy-N,N,N',N'-tetramethylrhodamine)
ccaaagtgtccatattgcctggtacgcc

SEQ ID NO: 1896 - DNA, 22 bp, Artificial
  an artificially synthesized primer sequence
cccttaaatcagcccgacttaa

SEQ ID NO: 1897 - DNA, 20 bp, Artificial
  an artificially synthesized primer sequence
cgaggaagcctgtccattga

SEQ ID NO: 1898 - DNA, 28 bp, Artificial
  an artificially synthesized TaqMan probe sequence
  misc_binding (1)..(1): Label FAM(6-carboxy-fluorescein)
  misc_binding (28)..(28): Label TAMRA(6-carboxy-N,N,N',N'-tetramethylrhodamine)
tgaccagaaatttgccaagccaagagtt

SEQ ID NO: 1899 - DNA, 21 bp, Artificial
  an artificially synthesized primer sequence
gcttgtgaaaattggccatgt

SEQ ID NO: 1900 - DNA, 20 bp, Artificial
  an artificially synthesized primer sequence
tccagcatggtcctggaact

SEQ ID NO: 1901 - DNA, 28 bp, Artificial
  an artificially synthesized TaqMan probe sequence
  misc_binding (1)..(1): Label FAM(6-carboxy-fluorescein)
  misc_binding (28)..(28): Label TAMRA(6-carboxy-N,N,N',N'-tetramethylrhodamine)
tcttcagtcactttgcggatgctgtcct

SEQ ID NO: 1902 - DNA, 24 bp, Artificial
  an artificially synthesized primer sequence
tgaactccgttgtgatagcatagg

SEQ ID NO: 1903 - DNA, 20 bp, Artificial
  an artificially synthesized primer sequence
ggacactgcacagcatcgat

SEQ ID NO: 1904 - DNA, 28 bp, Artificial
  an artificially synthesized TaqMan probe sequence
  misc_binding (1)..(1): Label FAM(6-carboxy-fluorescein)
  misc_binding (28)..(28): Label TAMRA(6-carboxy-N,N,N',N'-tetramethylrhodamine)
ccgcagattccaaccagtttaccctctt

SEQ ID NO: 1905 - DNA, 21 bp, Artificial
  an artificially synthesized primer sequence
cgaaggttccactgattgcaa

SEQ ID NO: 1906 - DNA, 21 bp, Artificial
  an artificially synthesized primer sequence
gcgtcacctacctggatgaga

SEQ ID NO: 1907 - DNA, 27 bp, Artificial
  an artificially synthesized TaqMan probe sequence
  misc_binding (1)..(1): Label FAM(6-carboxy-fluorescein)
  misc_binding (27)..(27): Label TAMRA(6-carboxy-N,N,N',N'-tetramethylrhodamine)
tacattgccatcttctacacagcggcc

SEQ ID NO: 1908 - DNA, 23 bp, Artificial
  an artificially synthesized primer sequence
gcccatttccgtgtagatattca

SEQ ID NO: 1909 - DNA, 22 bp, Artificial
  an artificially synthesized primer sequence
tgccactattccaggaatggtt

SEQ ID NO: 1910 - DNA, 28 bp, Artificial
  an artificially synthesized TaqMan probe sequence
  misc_binding (1)..(1): Label FAM(6-carboxy-fluorescein)
  misc_binding (28)..(28): Label TAMRA(6-carboxy-N,N,N',N'-tetramethylrhodamine)
cacggtttgccattctccaacagtgtta

SEQ ID NO: 1911 - DNA, 24 bp, Artificial
  an artificially synthesized primer sequence
cttcacctttggcgaatagtgtaa

SEQ ID NO: 1912 - DNA, 24 bp, Artificial
  an artificially synthesized primer sequence
ggttactggcgacagaaacaattc

SEQ ID NO: 1913 - DNA, 28 bp, Artificial
  an artificially synthesized TaqMan probe sequence
  misc_binding (1)..(1): Label FAM(6-carboxy-fluorescein)
  misc_binding (28)..(28): Label TAMRA(6-carboxy-N,N,N',N'-tetramethylrhodamine)
cgcaattacaacaagcaagcaagtgagc

SEQ ID NO: 1914 - DNA, 20 bp, Artificial
  an artificially synthesized primer sequence
tgccccattcgattttgttc

SEQ ID NO: 1915 - DNA, 21 bp, Artificial
  an artificially synthesized primer sequence
cagtgatggagtgtcgcaatg

SEQ ID NO: 1916 - DNA, 26 bp, Artificial
  an artificially synthesized TaqMan probe sequence
  misc_binding (1)..(1): Label FAM(6-carboxy-fluorescein)
  misc_binding (26)..(26): Label TAMRA(6-carboxy-N,N,N',N'-tetramethylrhodamine)
catctcctgcaacaagagctgaccga

SEQ ID NO: 1917 - DNA, 21 bp, Artificial
  an artificially synthesized primer sequence
cacatcctgaaagcccttctg

SEQ ID NO: 1918 - DNA, 22 bp, Artificial
  an artificially synthesized primer sequence
cctcttcttgaactggtgctgt

SEQ ID NO: 1919 - DNA, 26 bp, Artificial
  an artificially synthesized TaqMan probe sequence
  misc_binding (1)..(1): Label FAM(6-carboxy-fluorescein)
  misc_binding (26)..(26): Label TAMRA(6-carboxy-N,N,N',N'-tetramethylrhodamine)
tgggcttcatagcattcgcctactcc

SEQ ID NO: 1920 - DNA, 23 bp, Artificial
  an artificially synthesized primer sequence
ccatcttcctgtccctagacttc

SEQ ID NO: 1921 - DNA, 23 bp, Artificial
  an artificially synthesized primer sequence
gctgacgtgtgcagtaatactgg

SEQ ID NO: 1922 - DNA, 28 bp, Artificial
  an artificially synthesized TaqMan probe sequence
  misc_binding (1)..(1): Label FAM(6-carboxy-fluorescein)
  misc_binding (28)..(28): Label TAMRA(6-carboxy-N,N,N',N'-tetramethylrhodamine)
cagacagtgaccatctacagctttccgg

SEQ ID NO: 1923 - DNA, 21 bp, Artificial
  an artificially synthesized primer sequence
ttctgagacctctggcttcgt

SEQ ID NO: 1924 - DNA, 21 bp, Artificial
  an artificially synthesized primer sequence
agcaaaccaccttcacggatc

SEQ ID NO: 1925 - DNA, 28 bp, Artificial
  an artificially synthesized TaqMan probe sequence
  misc_binding (1)..(1): Label FAM(6-carboxy-fluorescein)
  misc_binding (28)..(28): Label TAMRA(6-carboxy-N,N,N',N'-tetramethylrhodamine)
aattaggcttggcatctgctctgaggcc

SEQ ID NO: 1926 - DNA, 23 bp, Artificial
  an artificially synthesized primer sequence
ggtgccagcaaagtgtattctcc

SEQ ID NO: 1927 - DNA, 26 bp, Artificial
  an artificially synthesized primer sequence
cgcagttctgtagttgagtttcaagg

SEQ ID NO: 1928 - DNA, 27 bp, Artificial
  an artificially synthesized TaqMan probe sequence
  misc_binding (1)..(1): Label FAM(6-carboxy-fluorescein)
  misc_binding (27)..(27): Label TAMRA(6-carboxy-N,N,N',N'-tetramethylrhodamine)
ttagcagggttgatgtggagcgtgaag

SEQ ID NO: 1929 - DNA, 21 bp, Artificial
  an artificially synthesized primer sequence
accaagaacagaatgcccagg

SEQ ID NO: 1930 - DNA, 23 bp, Artificial
  an artificially synthesized primer sequence
gcctttgcagtcaaccacttctg

SEQ ID NO: 1931 - DNA, 26 bp, Artificial
  an artificially synthesized TaqMan probe sequence
  misc_binding (1)..(1): Label FAM(6-carboxy-fluorescein)
  misc_binding (26)..(26): Label TAMRA(6-carboxy-N,N,N',N'-tetramethylrhodamine)
atgatcctgaccgtcggaaacaaggc

SEQ ID NO: 1932 - DNA, 22 bp, Artificial
  an artificially synthesized primer sequence
tctgttcccaccaggactccat

SEQ ID NO: 1933 - DNA, 22 bp, Artificial
  an artificially synthesized primer sequence
tctcagaccccaatcctaagcc

SEQ ID NO: 1934 - DNA, 30 bp, Artificial
  an artificially synthesized TaqMan probe sequence
  misc_binding (1)..(1): Label FAM(6-carboxy-fluorescein)
  misc_binding (30)..(30): Label TAMRA(6-carboxy-N,N,N',N'-tetramethylrhodamine)
tcttgtagccagtatgctcaaggctgtgaa

SEQ ID NO: 1935 - DNA, 22 bp, Artificial
  an artificially synthesized primer sequence
ctgcaataaggtatgggaagcc

SEQ ID NO: 1936 - DNA, 19 bp, Artificial
  an artificially synthesized primer sequence
tgcccgagctgatatttgg

SEQ ID NO: 1937 - DNA, 28 bp, Artificial
  an artificially synthesized TaqMan probe sequence
  misc_binding (1)..(1): Label FAM(6-carboxy-fluorescein)
  misc_binding (28)..(28): Label TAMRA(6-carboxy-N,N,N',N'-tetramethylrhodamine)
tagccgccacccacatagtatacccctt

SEQ ID NO: 1938 - DNA, 22 bp, Artificial
  an artificially synthesized primer sequence
catacatcacccatccttgcag

SEQ ID NO: 1939 - DNA, 21 bp, Artificial
  an artificially synthesized primer sequence
tttgtcactgagctccgaagg

SEQ ID NO: 1940 - DNA, 30 bp, Artificial
  an artificially synthesized TaqMan probe sequence
  misc_binding (1)..(1): Label FAM(6-carboxy-fluorescein)
  misc_binding (30)..(30): Label TAMRA(6-carboxy-N,N,N',N'-tetramethylrhodamine)
tagctgtcagagccaaagacatcggaatct

SEQ ID NO: 1941 - DNA, 22 bp, Artificial
  an artificially synthesized primer sequence
tcccaatgcctctgaggatatt

SEQ ID NO: 1942 - DNA, 21 bp, Artificial
  an artificially synthesized primer sequence
catcaggaacatcctgctgca

SEQ ID NO: 1943 - DNA, 28 bp, Artificial
  an artificially synthesized TaqMan probe sequence
  misc_binding (1)..(1): Label FAM(6-carboxy-fluorescein)
  misc_binding (28)..(28): Label TAMRA(6-carboxy-N,N,N',N'-tetramethylrhodamine)
cagctccaatcagcgaggccagtaatct

SEQ ID NO: 1944 - DNA, 24 bp, Artificial
  an artificially synthesized primer sequence
cacattattggttgggtcaactgg

SEQ ID NO: 1945 - DNA, 20 bp, Artificial
  an artificially synthesized primer sequence
aggcatggtcaatgccaggt

SEQ ID NO: 1946 - DNA, 26 bp, Artificial
  an artificially synthesized TaqMan probe sequence
  misc_binding (1)..(1): Label FAM(6-carboxy-fluorescein)
  misc_binding (26)..(26): Label TAMRA(6-carboxy-N,N,N',N'-tetramethylrhodamine)
tcatgacaacagcttccgcatcgcaa

SEQ ID NO: 1947 - DNA, 25 bp, Artificial
  an artificially synthesized primer sequence
agtctcacttatgacgggcttgatg

SEQ ID NO: 1948 - DNA, 20 bp, Artificial
  an artificially synthesized primer sequence
aagcattctgtggtctgccc

SEQ ID NO: 1949 - DNA, 26 bp, Artificial
  an artificially synthesized TaqMan probe sequence
  misc_binding (1)..(1): Label FAM(6-carboxy-fluorescein)
  misc_binding (26)..(26): Label TAMRA(6-carboxy-N,N,N',N'-tetramethylrhodamine)
ctcgcttctgcaagaccacgaacaca

SEQ ID NO: 1950 - DNA, 22 bp, Artificial
  an artificially synthesized primer sequence
ttcaccagattccccctcagag

SEQ ID NO: 1951 - DNA, 19 bp, Artificial
  an artificially synthesized primer sequence
caccattgagaatgcgcag

SEQ ID NO: 1952 - DNA, 26 bp, Artificial
  an artificially synthesized TaqMan probe sequence
  misc_binding (1)..(1): Label FAM(6-carboxy-fluorescein)
  misc_binding (26)..(26): Label TAMRA(6-carboxy-N,N,N',N'-tetramethylrhodamine)
ttttgcagattgacaatgccaggctg

SEQ ID NO: 1953 - DNA, 21 bp, Artificial
  an artificially synthesized primer sequence
acttggtcctgaagtcatcgg

SEQ ID NO: 1954 - DNA, 21 bp, Artificial
  an artificially synthesized primer sequence
tgacggcaaacatgacttcag

SEQ ID NO: 1955 - DNA, 26 bp, Artificial
  an artificially synthesized TaqMan probe sequence
  misc_binding (1)..(1): Label FAM(6-carboxy-fluorescein)
  misc_binding (26)..(26): Label TAMRA(6-carboxy-N,N,N',N'-tetramethylrhodamine)
aattcacagctcatccggtacgctgg

SEQ ID NO: 1956 - DNA, 18 bp, Artificial
  an artificially synthesized primer sequence
gccatcgggcatctggta

SEQ ID NO: 1957 - DNA, 21 bp, Artificial
  an artificially synthesized primer sequence
atgacctcccaattccattgg

SEQ ID NO: 1958 - DNA, 25 bp, Artificial
  an artificially synthesized TaqMan probe sequence
  misc_binding (1)..(1): Label FAM(6-carboxy-fluorescein)
  misc_binding (25)..(25): Label TAMRA(6-carboxy-N,N,N',N'-tetramethylrhodamine)
acatgggaatggtcgatgcctttga

SEQ ID NO: 1959 - DNA, 23 bp, Artificial
  an artificially synthesized primer sequence
accagagaagtcagccttctgtg

SEQ ID NO: 1960 - DNA, 25 bp, Artificial
  an artificially synthesized primer sequence
cacatgaggttttgtagcatgaact

SEQ ID NO: 1961 - DNA, 28 bp, Artificial
  an artificially synthesized TaqMan probe sequence
  misc_binding (1)..(1): Label FAM(6-carboxy-fluorescein)
  misc_binding (28)..(28): Label TAMRA(6-carboxy-N,N,N',N'-tetramethylrhodamine)
agcctcagaattgcatcttcaagtgcca

SEQ ID NO: 1962 - DNA, 25 bp, Artificial
  an artificially synthesized primer sequence
gcactgaagactgctatacaattgc

SEQ ID NO: 1963 - DNA, 22 bp, Artificial
  an artificially synthesized primer sequence
accacctcctaattctagcccc

SEQ ID NO: 1964 - DNA, 30 bp, Artificial
  an artificially synthesized TaqMan probe sequence
  misc_binding (1)..(1): Label FAM(6-carboxy-fluorescein)
  misc_binding (30)..(30): Label TAMRA(6-carboxy-N,N,N',N'-tetramethylrhodamine)
agttgtcaccaggtcacaagcaaaaagagc

SEQ ID NO: 1965 - DNA, 21 bp, Artificial
  an artificially synthesized primer sequence
catgtaaggcataggcacgct

SEQ ID NO: 1966 - DNA, 25 bp, Artificial
  an artificially synthesized primer sequence
gagagcaaatgtggactcagctagt

SEQ ID NO: 1967 - DNA, 27 bp, Artificial
  an artificially synthesized TaqMan probe sequence
  misc_binding (1)..(1): Label FAM(6-carboxy-fluorescein)
  misc_binding (27)..(27): Label TAMRA(6-carboxy-N,N,N',N'-tetramethylrhodamine)
tgtagcccgagatcacccacagagaac

SEQ ID NO: 1968 - DNA, 23 bp, Artificial
  an artificially synthesized primer sequence
aatgcccatgaggtattgtccta

SEQ ID NO: 1969 - DNA, 20 bp, Artificial
  an artificially synthesized primer sequence
gcagcaaatagagcattggc

SEQ ID NO: 1970 - DNA, 28 bp, Artificial
  an artificially synthesized TaqMan probe sequence
  misc_binding (1)..(1): Label FAM(6-carboxy-fluorescein)
  misc_binding (28)..(28): Label TAMRA(6-carboxy-N,N,N',N'-tetramethylrhodamine)
agcatgagatgctgatggaacagaagga

SEQ ID NO: 1971 - DNA, 21 bp, Artificial
  an artificially synthesized primer sequence
tgctccatcttctcagtcagc

SEQ ID NO: 1972 - DNA, 20 bp, Artificial
  an artificially synthesized primer sequence
gggctggcgagatattgaac

SEQ ID NO: 1973 - DNA, 27 bp, Artificial
  an artificially synthesized TaqMan probe sequence
  misc_binding (1)..(1): Label FAM(6-carboxy-fluorescein)
  misc_binding (27)..(27): Label TAMRA(6-carboxy-N,N,N',N'-tetramethylrhodamine)
ccattcaaagaggatgccaacctgctc

SEQ ID NO: 1974 - DNA, 21 bp, Artificial
  an artificially synthesized primer sequence
cgctcgatgcactgtagatca

SEQ ID NO: 1975 - DNA, 23 bp, Artificial
  an artificially synthesized primer sequence
ttaccctaagcgagaaagtgcaa

SEQ ID NO: 1976 - DNA, 17 bp, Artificial
  an artificially synthesized TaqMan probe sequence
  misc_binding (1)..(1): Label FAM(6-carboxy-fluorescein)
  misc_binding (17)..(17): Label TAMRA(6-carboxy-N,N,N',N'-tetramethylrhodamine)
cgcagccaacgcgccca

SEQ ID NO: 1977 - DNA, 22 bp, Artificial
  an artificially synthesized primer sequence
ccttaacccctgtggaacaaca

SEQ ID NO: 1978 - DNA, 30 bp, Artificial
  an artificially synthesized primer sequence
tgtctagttatatgaagtgaaccaattgtg

SEQ ID NO: 1979 - DNA, 26 bp, Artificial
  an artificially synthesized TaqMan probe sequence
  misc_binding (1)..(1): Label FAM(6-carboxy-fluorescein)
  misc_binding (26)..(26): Label TAMRA(6-carboxy-N,N,N',N'-tetramethylrhodamine)
tgcctttgcattgtattgcctcagcc

SEQ ID NO: 1980 - DNA, 28 bp, Artificial
  an artificially synthesized primer sequence
cgaaatgtattatgccaccttctagtaa

SEQ ID NO: 1981 - DNA, 21 bp, Artificial
  an artificially synthesized primer sequence
gggttacctgcccaaagagac

SEQ ID NO: 1982 - DNA, 24 bp, Artificial
  an artificially synthesized TaqMan probe sequence
  misc_binding (1)..(1): Label FAM(6-carboxy-fluorescein)
  misc_binding (24)..(24): Label TAMRA(6-carboxy-N,N,N',N'-tetramethylrhodamine)
ttcagaaccaaggctgggccttgg

SEQ ID NO: 1983 - DNA, 20 bp, Artificial
  an artificially synthesized primer sequence
cagaagacacgacggcacac

SEQ ID NO: 1984 - DNA, 19 bp, Artificial
  an artificially synthesized primer sequence
cagtgcccgcagcttacaa

SEQ ID NO: 1985 - DNA, 28 bp, Artificial
  an artificially synthesized TaqMan probe sequence
  misc_binding (1)..(1): Label FAM(6-carboxy-fluorescein)
  misc_binding (28)..(28): Label TAMRA(6-carboxy-N,N,N',N'-tetramethylrhodamine)
ctgtgtcggctagtcatcaaccgtctgg

SEQ ID NO: 1986 - DNA, 20 bp, Artificial
  an artificially synthesized primer sequence
tcggaggtagtcggccatac

SEQ ID NO: 1987 - DNA, 21 bp, Artificial
  an artificially synthesized primer sequence
tcgcagtgagactgcatcatc

SEQ ID NO: 1988 - DNA, 30 bp, Artificial
  an artificially synthesized TaqMan probe sequence
  misc_binding (1)..(1): Label FAM(6-carboxy-fluorescein)
  misc_binding (30)..(30): Label TAMRA(6-carboxy-N,N,N',N'-tetramethylrhodamine)
cttcagtacaaggagcagatgagccacctc

SEQ ID NO: 1989 - DNA, 20 bp, Artificial
  an artificially synthesized primer sequence
tttgctgactgcgcatgttc

SEQ ID NO: 1990 - DNA, 21 bp, Artificial
  an artificially synthesized primer sequence
tggtaacgtggacacccttga

SEQ ID NO: 1991 - DNA, 27 bp, Artificial
  an artificially synthesized TaqMan probe sequence
  misc_binding (1)..(1): Label FAM(6-carboxy-fluorescein)
  misc_binding (27)..(27): Label TAMRA(6-carboxy-N,N,N',N'-tetramethylrhodamine)
taatgattgctccaccagtttccgtgc

SEQ ID NO: 1992 - DNA, 19 bp, Artificial
  an artificially synthesized primer sequence
gttggcggctgctcatctt

SEQ ID NO: 1993 - DNA, 21 bp, Artificial
  an artificially synthesized primer sequence
gtcctctgcatgctaggcaag

SEQ ID NO: 1994 - DNA, 28 bp, Artificial
  an artificially synthesized TaqMan probe sequence
  misc_binding (1)..(1): Label FAM(6-carboxy-fluorescein)
  misc_binding (28)..(28): Label TAMRA(6-carboxy-N,N,N',N'-tetramethylrhodamine)
agccatccctcagtccaaccactttctg

SEQ ID NO: 1995 - DNA, 27 bp, Artificial
  an artificially synthesized primer sequence
acccttcttctcttcctctttaaaaaa

SEQ ID NO: 1996 - DNA, 21 bp, Artificial
  an artificially synthesized primer sequence
ggtgctgcagaatgtgaggtt

SEQ ID NO: 1997 - DNA, 27 bp, Artificial
  an artificially synthesized TaqMan probe sequence
  misc_binding (1)..(1): Label FAM(6-carboxy-fluorescein)
  misc_binding (27)..(27): Label TAMRA(6-carboxy-N,N,N',N'-tetramethylrhodamine)
aggctgctccagctctaccaacgtcct

SEQ ID NO: 1998 - DNA, 21 bp, Artificial
  an artificially synthesized primer sequence
aaccgttcaccacgttgttgt

SEQ ID NO: 1999 - DNA, 20 bp, Artificial
  an artificially synthesized primer sequence
tggaggctgcatcaagattg

SEQ ID NO: 2000 - DNA, 27 bp, Artificial
  an artificially synthesized TaqMan probe sequence
  misc_binding (1)..(1): Label FAM(6-carboxy-fluorescein)
  misc_binding (27)..(27): Label TAMRA(6-carboxy-N,N,N',N'-tetramethylrhodamine)
tcagtggcactgtcagatcaaacctgg

SEQ ID NO: 2001 - DNA, 23 bp, Artificial
  an artificially synthesized primer sequence
tcttccgtgtactggttgaaagg

SEQ ID NO: 2002 - DNA, 18 bp, Artificial
  an artificially synthesized primer sequence
cgagcaaaactgggcgaa

SEQ ID NO: 2003 - DNA, 25 bp, Artificial
  an artificially synthesized TaqMan probe sequence
  misc_binding (1)..(1): Label FAM(6-carboxy-fluorescein)
  misc_binding (25)..(25): Label TAMRA(6-carboxy-N,N,N',N'-tetramethylrhodamine)
acagcgcagagcaaaatcgaatggg

SEQ ID NO: 2004 - DNA, 17 bp, Artificial
  an artificially synthesized primer sequence
atggtgcttccggcctg

SEQ ID NO: 2005 - DNA, 18 bp, Artificial
  an artificially synthesized primer sequence
aggtgtcggtgcctgacc

SEQ ID NO: 2006 - DNA, 30 bp, Artificial
  an artificially synthesized TaqMan probe sequence
  misc_binding (1)..(1): Label FAM(6-carboxy-fluorescein)
  misc_binding (30)..(30): Label TAMRA(6-carboxy-N,N,N',N'-tetramethylrhodamine)
tggtctggtccctgttcaatacactcttca

SEQ ID NO: 2007 - DNA, 19 bp, Artificial
  an artificially synthesized primer sequence
gcccaggcagcagaagttc

SEQ ID NO: 2008 - DNA, 21 bp, Artificial
  an artificially synthesized primer sequence
agtccgctgtgctttgagaac

SEQ ID NO: 2009 - DNA, 20 bp, Artificial
  an artificially synthesized TaqMan probe sequence
  misc_binding (1)..(1): Label FAM(6-carboxy-fluorescein)
  misc_binding (20)..(20): Label TAMRA(6-carboxy-N,N,N',N'-tetramethylrhodamine)
tggcaccgtgcagtcgtccg

SEQ ID NO: 2010 - DNA, 20 bp, Artificial
  an artificially synthesized primer sequence
ccggaaacgaatacacggtg

SEQ ID NO: 2011 - DNA, 23 bp, Artificial
  an artificially synthesized primer sequence
tagcccaattaggcttggcatcc

SEQ ID NO: 2012 - DNA, 30 bp, Artificial
  an artificially synthesized TaqMan probe sequence
  misc_binding (1)..(1): Label FAM(6-carboxy-fluorescein)
  misc_binding (30)..(30): Label TAMRA(6-carboxy-N,N,N',N'-tetramethylrhodamine)
tagcacctgtgaacaatgcgttctctgatg

SEQ ID NO: 2013 - DNA, 22 bp, Artificial
  an artificially synthesized primer sequence
taagaaggcgttggtccatgct

SEQ ID NO: 2014 - DNA, 22 bp, Artificial
  an artificially synthesized primer sequence
tttaagacccccgagtcctctc

SEQ ID NO: 2015 - DNA, 26 bp, Artificial
  an artificially synthesized TaqMan probe sequence
  misc_binding (1)..(1): Label FAM(6-carboxy-fluorescein)
  misc_binding (26)..(26): Label TAMRA(6-carboxy-N,N,N',N'-tetramethylrhodamine)
ccaattggcaggatcaaagccagtga

SEQ ID NO: 2016 - DNA, 21 bp, Artificial
  an artificially synthesized primer sequence
ctccgcattttctcccacatc

SEQ ID NO: 2017 - DNA, 20 bp, Artificial
  an artificially synthesized primer sequence
gatgcaaggcctcattgctg

SEQ ID NO: 2018 - DNA, 26 bp, Artificial
  an artificially synthesized TaqMan probe sequence
  misc_binding (1)..(1): Label FAM(6-carboxy-fluorescein)
  misc_binding (26)..(26): Label TAMRA(6-carboxy-N,N,N',N'-tetramethylrhodamine)
cgctgtgttcttggtccttgttgcaa

SEQ ID NO: 2019 - DNA, 22 bp, Artificial
  an artificially synthesized primer sequence
agaagtggttgacggcgaagac

SEQ ID NO: 2020 - DNA, 22 bp, Artificial
  an artificially synthesized primer sequence
tctcagacaccaatcctgagtc

SEQ ID NO: 2021 - DNA, 30 bp, Artificial
  an artificially synthesized TaqMan probe sequence
  misc_binding (1)..(1): Label FAM(6-carboxy-fluorescein)
  misc_binding (30)..(30): Label TAMRA(6-carboxy-N,N,N',N'-tetramethylrhodamine)
tcttgcagcccctatgcccaaggttgtgat

SEQ ID NO: 2022 - DNA, 22 bp, Artificial
  an artificially synthesized primer sequence
ctgcaatgaggtatgggaatcc

SEQ ID NO: 2023 - DNA, 19 bp, Artificial
  an artificially synthesized primer sequence
cgggttctgggtgtggact

SEQ ID NO: 2024 - DNA, 26 bp, Artificial
  an artificially synthesized TaqMan probe sequence
  misc_binding (1)..(1): Label FAM(6-carboxy-fluorescein)
  misc_binding (26)..(26): Label TAMRA(6-carboxy-N,N,N',N'-tetramethylrhodamine)
ctgctacacacgtcgcataccccttg

SEQ ID NO: 2025 - DNA, 20 bp, Artificial
  an artificially synthesized primer sequence
catacagcacccatccctgc

SEQ ID NO: 2026 - DNA, 23 bp, Artificial
  an artificially synthesized primer sequence
cggcatctggtataacatcctca

SEQ ID NO: 2027 - DNA, 26 bp, Artificial
  an artificially synthesized TaqMan probe sequence
  misc_binding (1)..(1): Label FAM(6-carboxy-fluorescein)
  misc_binding (26)..(26): Label TAMRA(6-carboxy-N,N,N',N'-tetramethylrhodamine)
aggtgttgggaagctggctgtcatca

SEQ ID NO: 2028 - DNA, 25 bp, Artificial
  an artificially synthesized primer sequence
gatgaagtcagacgtgaaggagatc

SEQ ID NO: 2029 - DNA, 21 bp, Artificial
  an artificially synthesized primer sequence
gaatgatcaacgccaggtttg

SEQ ID NO: 2030 - DNA, 29 bp, Artificial
  an artificially synthesized TaqMan probe sequence
  misc_binding (1)..(1): Label FAM(6-carboxy-fluorescein)
  misc_binding (29)..(29): Label TAMRA(6-carboxy-N,N,N',N'-tetramethylrhodamine)
acctatcacgacaatagcttccgcattgc

SEQ ID NO: 2031 - DNA, 21 bp, Artificial
  an artificially synthesized primer sequence
cgctaatgacgggtttgatgc

SEQ ID NO: 2032 - DNA, 19 bp, Artificial
  an artificially synthesized primer sequence
ggtctgcccgtccaacttc

SEQ ID NO: 2033 - DNA, 27 bp, Artificial
  an artificially synthesized TaqMan probe sequence
  misc_binding (1)..(1): Label FAM(6-carboxy-fluorescein)
  misc_binding (27)..(27): Label TAMRA(6-carboxy-N,N,N',N'-tetramethylrhodamine)
ttctgcaaaaccgtcacctcagtggag

SEQ ID NO: 2034 - DNA, 21 bp, Artificial
  an artificially synthesized primer sequence
tcaccaggttcccattcagag

SEQ ID NO: 2035 - DNA, 21 bp, Artificial
  an artificially synthesized primer sequence
tcaagaccattgaggacctga

SEQ ID NO: 2036 - DNA, 28 bp, Artificial
  an artificially synthesized TaqMan probe sequence
  misc_binding (1)..(1): Label FAM(6-carboxy-fluorescein)
  misc_binding (28)..(28): Label TAMRA(6-carboxy-N,N,N',N'-tetramethylrhodamine)
acacgatcacctactcactcctcaagca

SEQ ID NO: 2037 - DNA, 20 bp, Artificial
  an artificially synthesized primer sequence
agcctggcattgtcaatctg

SEQ ID NO: 2038 - DNA, 21 bp, Artificial
  an artificially synthesized primer sequence
tggtgggtttcatgctgtacc

SEQ ID NO: 2039 - DNA, 24 bp, Artificial
  an artificially synthesized TaqMan probe sequence
  misc_binding (1)..(1): Label FAM(6-carboxy-fluorescein)
  misc_binding (24)..(24): Label TAMRA(6-carboxy-N,N,N',N'-tetramethylrhodamine)
tgaagaagaaggacgaaggcagct

SEQ ID NO: 2040 - DNA, 24 bp, Artificial
  an artificially synthesized primer sequence
gcatagaattcctcctgtttggtg

SEQ ID NO: 2041 - DNA, 22 bp, Artificial
  an artificially synthesized primer sequence
tctctgacccttgcagtcttca

SEQ ID NO: 2042 - DNA, 27 bp, Artificial
  an artificially synthesized TaqMan probe sequence
  misc_binding (1)..(1): Label FAM(6-carboxy-fluorescein)
  misc_binding (27)..(27): Label TAMRA(6-carboxy-N,N,N',N'-tetramethylrhodamine)
cattttgatgaccaaaggcctgaagca

SEQ ID NO: 2043 - DNA, 22 bp, Artificial
  an artificially synthesized primer sequence
gaatttgctgacaggtccattg

SEQ ID NO: 2044 - DNA, 24 bp, Artificial
  an artificially synthesized primer sequence
tcctactacttccgtttccaaagg

SEQ ID NO: 2045 - DNA, 27 bp, Artificial
  an artificially synthesized TaqMan probe sequence
  misc_binding (1)..(1): Label FAM(6-carboxy-fluorescein)
  misc_binding (27)..(27): Label TAMRA(6-carboxy-N,N,N',N'-tetramethylrhodamine)
cctctgttgtgccctctgctttgtcat

SEQ ID NO: 2046 - DNA, 23 bp, Artificial
  an artificially synthesized primer sequence
ctcacatcagtcaccatggagag

SEQ ID NO: 2047 - DNA, 21 bp, Artificial
  an artificially synthesized primer sequence
ggctttcatgctgtaccggat

SEQ ID NO: 2048 - DNA, 24 bp, Artificial
  an artificially synthesized TaqMan probe sequence
  misc_binding (1)..(1): Label FAM(6-carboxy-fluorescein)
  misc_binding (24)..(24): Label TAMRA(6-carboxy-N,N,N',N'-tetramethylrhodamine)
tggaggagcccaaacaagccaatg

SEQ ID NO: 2049 - DNA, 22 bp, Artificial
  an artificially synthesized primer sequence
aggcgtagaactcctcctgctt

SEQ ID NO: 2050 - DNA, 24 bp, Artificial
  an artificially synthesized primer sequence
agctgtactttgattgcaggtcaa

SEQ ID NO: 2051 - DNA, 26 bp, Artificial
  an artificially synthesized TaqMan probe sequence
  misc_binding (1)..(1): Label FAM(6-carboxy-fluorescein)
  misc_binding (26)..(26): Label TAMRA(6-carboxy-N,N,N',N'-tetramethylrhodamine)
ctcaccagttgtccatgtccacccac

SEQ ID NO: 2052 - DNA, 24 bp, Artificial
  an artificially synthesized primer sequence
ggaccaatcagctaggacaacttg

SEQ ID NO: 2053 - DNA, 21 bp, Artificial
  an artificially synthesized primer sequence
tttcccttgtggcagtcttca

SEQ ID NO: 2054 - DNA, 30 bp, Artificial
  an artificially synthesized TaqMan probe sequence
  misc_binding (1)..(1): Label FAM(6-carboxy-fluorescein)
  misc_binding (30)..(30): Label TAMRA(6-carboxy-N,N,N',N'-tetramethylrhodamine)
cctctaccctacatgatctggagcaacagc

SEQ ID NO: 2055 - DNA, 19 bp, Artificial
  an artificially synthesized primer sequence
ttggaaagcccccaaatgt

SEQ ID NO: 2056 - DNA, 22 bp, Artificial
  an artificially synthesized primer sequence
ccgagtctcttgcgaaatacaa

SEQ ID NO: 2057 - DNA, 26 bp, Artificial
  an artificially synthesized TaqMan probe sequence
  misc_binding (1)..(1): Label FAM(6-carboxy-fluorescein)
  misc_binding (26)..(26): Label TAMRA(6-carboxy-N,N,N',N'-tetramethylrhodamine)
acaacccactggctagaagccctggt

SEQ ID NO: 2058 - DNA, 22 bp, Artificial
  an artificially synthesized primer sequence
cggaggactgaagtgaacagct

SEQ ID NO: 2059 - DNA, 19 bp, Artificial
  an artificially synthesized primer sequence
aaccgccagagaggatgct

SEQ ID NO: 2060 - DNA, 26 bp, Artificial
  an artificially synthesized TaqMan probe sequence
  misc_binding (1)..(1): Label FAM(6-carboxy-fluorescein)
  misc_binding (26)..(26): Label TAMRA(6-carboxy-N,N,N',N'-tetramethylrhodamine)
tggatccttggccgactacctgacct

SEQ ID NO: 2061 - DNA, 21 bp, Artificial
  an artificially synthesized primer sequence
cacatccgatctccccaagta

SEQ ID NO: 2062 - DNA, 23 bp, Artificial
  an artificially synthesized primer sequence
ggcaaggtggaacagttatctcc

SEQ ID NO: 2063 - DNA, 29 bp, Artificial
  an artificially synthesized TaqMan probe sequence
  misc_binding (1)..(1): Label FAM(6-carboxy-fluorescein)
  misc_binding (29)..(29): Label TAMRA(6-carboxy-N,N,N',N'-tetramethylrhodamine)
tccgaagggaaaggaataagatggctgca

SEQ ID NO: 2064 - DNA, 24 bp, Artificial
  an artificially synthesized primer sequence
agtgtatcagtcagctccctcctc

SEQ ID NO: 2065 - DNA, 21 bp, Artificial
  an artificially synthesized primer sequence
tgtggtgtaagcgtcgtcgta

SEQ ID NO: 2066 - DNA, 26 bp, Artificial
  an artificially synthesized TaqMan probe sequence
  misc_binding (1)..(1): Label FAM(6-carboxy-fluorescein)
  misc_binding (26)..(26): Label TAMRA(6-carboxy-N,N,N',N'-tetramethylrhodamine)
ccaatgcccagaacctctccatgaac

SEQ ID NO: 2067 - DNA, 20 bp, Artificial
  an artificially synthesized primer sequence
cgccaaatattgctcccttc

SEQ ID NO: 2068 - DNA, 20 bp, Artificial
  an artificially synthesized primer sequence
cttgcagcccctaccagttc

SEQ ID NO: 2069 - DNA, 25 bp, Artificial
  an artificially synthesized TaqMan probe sequence
  misc_binding (1)..(1): Label FAM(6-carboxy-fluorescein)
  misc_binding (25)..(25): Label TAMRA(6-carboxy-N,N,N',N'-tetramethylrhodamine)
cccggaacgccatcctaacacagtg

SEQ ID NO: 2070 - DNA, 21 bp, Artificial
  an artificially synthesized primer sequence
tgacgacacgcgtcttcatag

SEQ ID NO: 2071 - DNA, 23 bp, Artificial
  an artificially synthesized primer sequence
ctcgtcaaagtcaccaaggctat

SEQ ID NO: 2072 - DNA, 25 bp, Artificial
  an artificially synthesized TaqMan probe sequence
  misc_binding (1)..(1): Label FAM(6-carboxy-fluorescein)
  misc_binding (25)..(25): Label TAMRA(6-carboxy-N,N,N',N'-tetramethylrhodamine)
ccatgtaccaaatcccaggccagct

SEQ ID NO: 2073 - DNA, 22 bp, Artificial
  an artificially synthesized primer sequence
aataccaacgggctcagagtca

SEQ ID NO: 2074 - DNA, 24 bp, Artificial
  an artificially synthesized primer sequence
ctattctcaggactagcccagctt

SEQ ID NO: 2075 - DNA, 27 bp, Artificial
  an artificially synthesized TaqMan probe sequence
  misc_binding (1)..(1): Label FAM(6-carboxy-fluorescein)
  misc_binding (27)..(27): Label TAMRA(6-carboxy-N,N,N',N'-tetramethylrhodamine)
tccaggcatgaatacggagatcacaca

SEQ ID NO: 2076 - DNA, 25 bp, Artificial
  an artificially synthesized primer sequence
cctagaacggatatcttcaaatgga

SEQ ID NO: 2077 - DNA, 23 bp, Artificial
  an artificially synthesized primer sequence
cctgaagaggaagagaaacggag

SEQ ID NO: 2078 - DNA, 26 bp, Artificial
  an artificially synthesized TaqMan probe sequence
  misc_binding (1)..(1): Label FAM(6-carboxy-fluorescein)
  misc_binding (26)..(26): Label TAMRA(6-carboxy-N,N,N',N'-tetramethylrhodamine)
cgaagggaacggaataagatggctgc

SEQ ID NO: 2079 - DNA, 17 bp, Artificial
  an artificially synthesized primer sequence
cgattccggcacttggc

SEQ ID NO: 2080 - DNA, 420 bp, Artificial
  an artificially synthesized probe sequence
ccgtcagcatgggtccctggacccactccttgcgcgccgtcctgctgctggtgcttttgggagtctgcaccgtgcgctccgacactcctgccaactgcacctaccctgatctgctgggcacctgggtgttccaggtgggccctagaagttcccgaagcgacattaactgctcggtgatggaagcaacagaagaaaaggtagtggtacaccttaagaagttggatactgcctacgacgagctgggcaattccgggcattttaccctcatttacaaccaaggcttcgagattgtgttgaatgactacaaatggtttgcgtttttcaagtatgaagtcagaggccacacagctatcagttactgccatgagaccatgactgggtgggtccatgatgtgctgggccggaactgggcttgctttg

SEQ ID NO: 2081 - DNA, 540 bp, Artificial
  an artificially synthesized probe sequence
atggtggattcccatacctcattgcagggaagtatgcccaagattttggggtggtggaagaaagctgctttccctacacagccaaagattctccatgcaaaccaagggagaattgcctccgttactattcttctgactactactatgtgggtggtttctatggtggctgcaatgaagccctgatgaagcttgagctggtcaaacatggacccatggcagttgcctttgaagtccacgatgacttcctacactaccacagtggaatctatcaccacactgggctgagtgaccctttcaaccccttcgagctgacaaatcatgctgttttgcttgtgggctatggaagagatccagttactgggatagaatactggattataaagaacagctggggctctaactggggggagagtggctacttccgtatccgcagaggaactgatgaatgtgcaattgagagtatagccgtggcggccataccgattcctaaattataggacatagctcccagtgttacatacgggtctttatcactcacag

SEQ ID NO: 2082 - DNA, 341 bp, Artificial
  an artificially synthesized probe sequence
tgacggccaccagatcattcacagttgaagaaaaaggcttttctatgtttccagtaattacaaatcctccatacaaccacacaatggaagtggaaataggaaaaccagcaagtattgcctgttcagcttgctttggcaaaggctctcacttcttggctgatgtcctgtggcagattaacaaaacagtagttggaaattttggtgaagcaagaattcaagaagaggaaggtcgaaatgaaagttccagcaatgacatggattgtttaacctcagtgttaaggataactggtgtgacagaaaaggacctgtccctggaatatgactgtctggccctgaacctt

SEQ ID NO: 2083 - DNA, 383 bp, Artificial
  an artificially synthesized probe sequence
cagcaacaccacaaccaccacccaggctggacctgcacacgctgttcctacctcaggaataatctttctgtggctcttgctgtccagatgccctcatgaaccagtggcctctcactggccttggccagcttagaccatacatcagcgtatgctagttgctaggcaggggcggtgtaccctgcagtgggcgtgatcaagtctgtctgtctctgggtggacagaatgccaggagtcccctcccagcaacttctgcactggccctcacacagtgacctctctccaaggcacagttcctgtatctacatcccactcgtgtatgagacttaggaaaggaaaagacgtcgttcttggggtgttgggacaagaagttgccgtcatctccg

SEQ ID NO: 2084 - DNA, 363 bp, Artificial
  an artificially synthesized probe sequence
ctccaaaatcctcaagccccatcgaaaattgtcatcctatgggattgacaaggaaaccactatccaccttaccctgaaggtggtgaagcccagtgatgaagagctgcccttgtttctggtggagtccaaaaacgaggggcaaaggcacctcctccgagttcgaagatccagctcagtggcccaggtgaaagagatgatcgagagtgtgacctctgtgatccctaagaagcaggttgtgaattgcaacggaaagaagctggaagatggaaagatcatggctgactacaacatcaagagtggcagtttgctctttctgacaacacactgcactgggggatgaccacggggatgcggtgatgagaa

SEQ ID NO: 2085 - DNA, 398 bp, Artificial
  an artificially synthesized probe sequence
gaccagccatagcacttacccatagagaccgctaggttggccgtgctgtggtgggggatggaggcctgagctccttggaatccacttttcattgtggggaggtctactttagacaacttggttttgcacatattttctctaatttctctgttcagagccccagcagaccttattactggggtaaggcaagtctgttgactggtgtccctcacctcgcttccctaatctacattcaggagaccgaatcgggggttaataagactttttttgttttttgtttttgtttttaacctagaagaaccaaatctggacggcaaaacgtaggcttagtttgtgtgttgtctctgagtttgtcgctcatgcgtacaacagggtatggactatctgtatggtgcccc

SEQ ID NO: 2086 - DNA, 410 bp, Artificial
  an artificially synthesized probe sequence
atgctgggagtgtggaaagccaggttgtccccagcacacaccgagtgaccgattccaagttccatccactccatgccaagatggatgtcatcaaaaaaggccacgccagggacagccagcgctacaaagttgactatgagtctcaaagcacagacacccagaacttctcctccgagtctaagcgggagacagaatacggtccctgccgcagagaaatggaggacacactgaatcatctgaagttcctcaatgtgctgagtcccagaggcgtccacatcccaaactgtgacaagaaggggttctataagaagaaacgatgccgcccttccaaaggcagaaagcagagcttctgctggtgtgtggacaagtatgggcagcgcttgccaggctacgacaccaaggggaaagac
